(19) United States
(12) Patent Application Publication
(10) Pub. No.: US 2026/0185071 A1
(43) Pub. Date: Jul. 2, 2026

(54) COMPOSITIONS AND METHODS FOR ALTERING A NUCLEOBASE IN A LIPOPROTEIN(A) POLYNUCLEOTIDE

(71) Applicant: Beam Therapeutics Inc., Cambridge, MA (US)

(72) Inventors: Tanggis Bohnuud, Cambridge, MA (US); Margaret Parker, Cambridge, MA (US); Tianyu Zou, Cambridge, MA (US); Chad Orrin Brown, Cambridge, MA (US)

(73) Assignee: Beam Therapeutics Inc., Cambridge, MA (US)

(21) Appl. No.: 19/563,909

(22) Filed: Mar. 11, 2026

Related U.S. Application Data
(63) Continuation of application No. PCT/US2024/047459, filed on Sep. 19, 2024.
(60) Provisional application No. 63/583,795, filed on Sep. 19, 2023.

(51) Int. Cl. C12N 9/22; A61P 9/10; C12N 9/78; C12N 15/11; C12N 15/88

(52) U.S. Cl. CPC C12N 9/226; A61P 9/10; C12N 9/78; C12N 15/11; C12N 15/88; C12Y 305/04004; C12Y 305/04005; C12N 2310/20

(57) ABSTRACT

The disclosure features compositions and methods for treating cardiovascular disease by introducing one or more alterations into a lipoprotein(a) (LPA) polynucleotide in a cell. In particular embodiments, the disclosure provides a base editor system (e.g., a fusion protein or complex comprising a programable DNA binding protein, a nucleobase editor, and gRNA) for modifying an LPA polynucleotide, where the modification is associated with reduced expression, and/or reduced activity of the LPA polypeptide encoded by the polynucleotide.

### CROSS REFERENCE TO RELATED APPLICATIONS

[0001] This application is a continuation under 35 U.S.C. § 111(a) of PCT International Patent Application No. PCT/US2024/047459, filed Sep. 19, 2024, designating the United States and published in English, which claims priority to and the benefit of U.S. Provisional Application No. 63/583,795, filed Sep. 19, 2023, the entire contents of each of which are incorporated by reference herein.

### SEQUENCE LISTING

[0002] This application contains a Sequence Listing which has been submitted electronically in XML format and is hereby incorporated by reference in its entirety. The Sequence Listing XML file, created on Sep. 12, 2024, is named 180802-056102PCT_SL.xml and is 2,559,791 bytes in size.

### BACKGROUND

[0003] Cardiovascular disease (CVD) is the leading cause of death globally. An estimated 17.9 million people died from CVDs in 2019, representing 32% of all global deaths. Of these deaths, 85% were due to heart attack and stroke. Over three quarters of CVD deaths take place in low- and middle-income countries. Out of the 17 million premature deaths (under the age of 70) due to noncommunicable diseases in 2019, 38% were caused by CVDs. Therefore, improved methods for treating cardiovascular disease are urgently required.

### SUMMARY

[0004] As described below, the disclosure features compositions and methods for treating cardiovascular disease by introducing one or more alterations into a lipoprotein(a) (LPA) polynucleotide in a cell. In particular embodiments, the disclosure provides a base editor system (e.g., a fusion protein or complex comprising a programable DNA binding protein, a nucleobase editor, and gRNA) for modifying an LPA polynucleotide, where the modification is associated with reduced expression, and/or reduced activity of the LPA polypeptide encoded by the polynucleotide. Non-limiting examples of alterations include base edits and/or double-strand cuts.

[0005] In one aspect, the disclosure provides a method of editing a nucleobase of a lipoprotein A (LPA) polynucleotide in a cell. The method involves contacting the LPA polynucleotide with a base editor system containing a guide RNA, or a polynucleotide encoding the guide RNA, and a base editor containing, or one or more polynucleotides encoding the base editor, where the base editor contains a fusion protein or a protein complex. The base editor contains a nucleic acid programmable DNA binding protein (napDNAbp) domain and a deaminase domain. The guide RNA targets the base editor to effect an alteration of the nucleobase of the LPA polynucleotide.

[0006] In another aspect, the disclosure provides a method of treating atherosclerosis and/or cardiovascular disease in a subject in need thereof The method involves contacting a cell of the subject with a base editor system containing a base editor, or one or more polynucleotide encoding the base editor, where the base editor contains a fusion protein or protein complex. The base editor contains a nucleic acid programmable DNA binding protein (napDNAbp) domain and a deaminase domain. The base editor system further contains a guide RNA, or a polynucleotide encoding the guide RNA, where the guide RNA targets the base editor to effect an alteration of a nucleobase of an LPA polynucleotide.

[0007] In another aspect, the disclosure provides a modified cell containing an alteration in a nucleobase of a LPA polynucleotide. The alteration is prepared by the method of any aspect of the disclosure, or embodiments thereof.

[0008] In another aspect, the disclosure provides a base editor system containing a fusion protein, or one or more polynucleotides encoding the fusion protein, where the fusion protein contains a nucleic acid programmable DNA binding protein domain (napDNAbp) and a deaminase domain. The base editor system further contains a guide RNA, or a guide RNA encoding the guide RNA. The guide RNA targets the base editor to effect an alteration of a nucleobase of an LPA polynucleotide.

[0009] In another aspect, the disclosure provides a polynucleotide or set of polynucleotides encoding the base editor system of any aspect of the disclosure, or embodiments thereof, or a component thereof.

[0010] In another aspect, the disclosure provides a lipid nanoparticle containing the base editor system, the polynucleotide, or the set of polynucleotides of any aspect of the disclosure, or embodiments thereof.

[0011] In another aspect, the disclosure provides a pharmaceutical composition containing the modified cell, the base editor system, the polynucleotide, the set of polynucleotides, or the lipid nanoparticle of any aspect of the disclosure, or embodiments thereof, and a pharmaceutically acceptable excipient.

[0012] In another aspect, the disclosure provides a kit containing the modified cell, the base editor system, the polynucleotide, the set of polynucleotides, the lipid nanoparticle, or the pharmaceutical composition of any aspect of the disclosure, or embodiments thereof, for use in the method of any aspect of the disclosure, or embodiments thereof. The kit further contains a container.

[0013] In another aspect, the disclosure provides a guide RNA containing a sequence listed in Table TA-1, 1A-2, 1B-1, 1B-2, 1C-1, or 1C-2.

[0014] In any aspect of the disclosure, or embodiments thereof, the cell is in vivo or in vitro. In any aspect of the disclosure, or embodiments thereof, the cell is a mammalian cell. In any aspect of the disclosure, or embodiments thereof, the cell is a liver cell in a rodent or human. In any aspect of the disclosure, or embodiments thereof, the cell is a hepatocyte.

[0015] In any aspect of the disclosure, or embodiments thereof, the cell is contacted with or the base editor system contains two or more guide RNAs, where each guide RNA binds a different location within the LPA polynucleotide.

[0016] In any aspect of the disclosure, or embodiments thereof, the guide RNA is selected from the guides listed in Tables TA-1, 1B-1, and 1C-1.

[0017] In any aspect of the disclosure, or embodiments thereof, the deaminase domain is an adenosine deaminase or a cytidine deaminase. In any aspect of the disclosure, or embodiments thereof, the adenosine deaminase contains an amino acid sequence with at least about 90% identity to the following amino acid sequence or a fragment thereof lacking the N-terminal methionine and contains one or more amino acid alterations selected from one or more of I76Y, V82S, Y123H, Y147R, and Q154R compared to the following amino acid sequence: TadA*7.10 MSEVEFSHEYWMRHALTLAKRARDEREVPVGAVLVLNNRVIGEGWNRAIGLHDPTAHAEIMALR QGGLVMQNYRLIDATLYVTFEPCVMCAGAMIHSRIGRVVFGVRNAKTGAAGSLMDVLHYPGMNH RVEITEGILADECAALLCYFFRMPRQVFNAQKKAQSSTD (SEQ ID NO: 1). In any aspect of the disclosure, or embodiments thereof, the adenosine deaminase contains the amino acid alterations I76Y, V82S, Y123H, Y147R, and Q154R. In any aspect of the disclosure, or embodiments thereof, the adenosine deaminase has at least about 95% identity to SEQ ID NO: 1. In any aspect of the disclosure, or embodiments thereof, the cytidine deaminase contains an amino acid sequence with at least about 90% identity to the following amino acid sequence or a fragment thereof lacking the N-terminal methionine:

ppAPOBEC1
(SEQ ID NO: 23)
MTSEKGPSTGDPTLRRRIESWEFDVFYDPRELRKETCLLYEIKWGMSR
KIWRSSGKNTTNHVEVNFIKKFTSERRFHSSISCSITWFLSWSPCWEC
SQAIREFLSQHPGVTLVIYVARLFWHMDQRNRQGLRDLVNSGVTIQIM
RASEYYHCWRNFVNYPPGDEAHWPQYPPLWMMLYALELHCIILSLPPC
LKISRRWQNHLAFFRLHLQNCHYQTIPPHILLATGLIHPSVTWR.

[0018] In any aspect of the disclosure, or embodiments thereof, alteration of the nucleobase is associated with a reduction in transcription of a polynucleotide sequence encoding the LPA protein. In any aspect of the disclosure, or embodiments thereof, alteration of the nucleobase in the LPA polynucleotide results in a missense mutation. In any aspect of the disclosure, or embodiments thereof, alteration of the nucleobase in the LPA polynucleotide disrupts a splice site. In any aspect of the disclosure, or embodiments thereof, the alteration introduces a single nucleotide polymorphism (SNP) into the LPA polynucleotide, where the SNP is associated with reduced serum concentrations of LPA in a subject and/or reduced incidence of atherosclerosis and/or cardiovascular disease in a subject. In various embodiments, the SNP is selected from one or more of, chr6:160531784:T>C, chr6:160532531:C>T, chr6:160548552:G>A, chr6:160532610:A>G, chr6:160591049:A>G, chr6:160635134:G>A, and chr6:160547886:A>G. In any aspect of the disclosure, or embodiments thereof, the alteration results in a premature STOP codon. In any aspect of the disclosure, or embodiments thereof, the alteration is associated with a reduction in incidence of cardiovascular disease in a subject.

[0019] In any aspect of the disclosure, or embodiments thereof, the napDNAbp domain is a Staphylococcus aureus Cas9 (saCas9) or a Streptococcus pyogenes Cas9 (spCas9). In any aspect of the disclosure, or embodiments thereof, the napDNAbp has specificity for a protospacer adjacent motif (PAM) selected from one or more of: NG, NGA, NGC, NGG, NNGRRT, NNNRRT, and NRCH, where “N” indicates A, C, G, or T, “R” indicates A or G, and “H” represents A, C, or T. In any aspect of the disclosure, or embodiments thereof, the Cas9 is a dead Cas9 (dCas9) or Cas9 nickase (nCas9). In any aspect of the disclosure, or embodiments thereof, the base editor contains an amino acid sequence with at least about 90% identity to a sequence listed in Table 2. In any aspect of the disclosure, or embodiments thereof, the guide RNA contains a nucleic acid sequence containing at least 10, 11, 12, 13, 14, 15, 16, 17, 18, 19, or 20 contiguous nucleotides of a spacer nucleic acid sequence listed in Table 1A-2, 1B-2, or 1C-2. In any aspect of the disclosure, or embodiments thereof, the guide RNA contains a nucleic acid sequence listed in Table 1A-I, 1B-1, or IC-1.

[0020] In any aspect of the disclosure, or embodiments thereof, the guide RNA contains a nucleic acid analog. In any aspect of the disclosure, or embodiments thereof, the guide RNA contains one or more of a 2′-OMe and a phosphorothioate.

[0021] In any aspect of the disclosure, or embodiments thereof, the base editor further contains one or more uracil glycosylase inhibitors (UGIs).

[0022] In any aspect of the disclosure, or embodiments thereof, the base editor further contains one or more nuclear localization sequences (NLS). In any aspect of the disclosure, or embodiments thereof, the base editor contains two NLS.

[0023] In any aspect of the disclosure, or embodiments thereof, the method involves altering the nucleobase of the LPA polynucleotide at a rate of greater than 50%. In any aspect of the disclosure, or embodiments thereof, the method is associated with at least a 50% reduction of serum concentrations of LPA in the subject. In any aspect of the disclosure, or embodiments thereof, the method is associated with a reduction of serum concentrations of LPA in the subject to less than about 50 mg/dL. In any aspect of the disclosure, or embodiments thereof, the method is associated with at least a 10% reduction of incidence of coronary heart disease in the subject.

[0024] In any aspect of the disclosure, or embodiments thereof, the deaminase domain is inserted within the napDNAbp domain.

[0025] In any aspect of the disclosure, or embodiments thereof, the base editor system is administered to the subject using a lipid nanoparticle containing the guide RNA and an mRNA molecule encoding the base editor.

[0026] In any aspect provided herein, or embodiments thereof, the method is not a process for modifying the germline genetic identity of human beings.

### Definitions

[0027] Unless defined otherwise, all technical and scientific terms used herein have the meaning commonly understood by a person skilled in the art to which this disclosure belongs. The following references provide one of skill with a general definition of many of the terms used in this disclosure: Singleton et al., Dictionary of Microbiology and Molecular Biology (2nd ed. 1994); The Cambridge Dictionary of Science and Technology (Walker ed., 1988); The Glossary of Genetics, 5th Ed., R. Rieger et al. (eds.), Springer Verlag (1991); and Hale & Marham, The Harper Collins Dictionary of Biology (1991). As used herein, the following terms have the meanings ascribed to them below, unless specified otherwise.

[0028] By “atherosclerosis” is meant a pathology associated with the deposition of plaques of fatty material on the walls of blood vessels.

[0029] By “cardiovascular disease” is meant a pathology affecting the heart and/or blood vessels.

[0030] By “lipoprotein(a) (LPA or LP(a)) polypeptide” is meant an LPA protein or fragment thereof having at least about 85% amino acid sequence identity to a polypeptide sequence provided at Ensemble Transcript Accession No. ENST00000316300.10 and capable of stimulating secretion of plasminogen activator inhibitor-1. An exemplary LPA polypeptide amino acid sequence from Homo Sapiens is provided below (Ensemble Transcript Accession No. ENST00000316300.10):

(SEQ ID NO: 426)
MEHKEVVLLLLLFLKSAAPEQSHVVQDCYHGDGQSYRGTYSTTVTGRTCQ
AWSSMTPHQHNRTTENYPNAGLIMNYCRNPDAVAAPYCYTRDPGVRWEYC
NLTQCSDAEGTAVAPPTVTPVPSLEAPSEQAPTEQRPGVQECYHGNGQSY
RGTYSTTVTGRTCQAWSSMTPHSHSRTPEYYPNAGLIMNYCRNPDAVAAP
YCYTRDPGVRWEYCNLTQCSDAEGTAVAPPTVTPVPSLEAPSEQAPTEQR
PGVQECYHGNGQSYRGTYSTTVTGRTCQAWSSMTPHSHSRTPEYYPNAGL
IMNYCRNPDAVAAPYCYTRDPGVRWEYCNLTQCSDAEGTAVAPPTVTPVP
SLEAPSEQAPTEQRPGVQECYHGNGQSYRGTYSTTVTGRTCQAWSSMTPH
SHSRTPEYYPNAGLIMNYCRNPDAVAAPYCYTRDPGVRWEYCNLTQCSDA
EGTAVAPPTVTPVPSLEAPSEQAPTEQRPGVQECYHGNGQSYRGTYSTTV
TGRTCQAWSSMTPHSHSRTPEYYPNAGLIMNYCRNPDAVAAPYCYTRDPG
VRWEYCNLTQCSDAEGTAVAPPTVTPVPSLEAPSEQAPTEQRPGVQECYH
GNGQSYRGTYSTTVTGRTCQAWSSMTPHSHSRTPEYYPNAGLIMNYCRNP
DAVAAPYCYTRDPGVRWEYCNLTQCSDAEGTAVAPPTVTPVPSLEAPSEQ
APTEQRPGVQECYHGNGQSYRGTYSTTVTGRTCQAWSSMTPHSHSRTPEY
YPNAGLIMNYCRNPDAVAAPYCYTRDPGVRWEYCNLTQCSDAEGTAVAPP
TVTPVPSLEAPSEQAPTEQRPGVQECYHGNGQSYRGTYSTTVTGRTCQAW
SSMTPHSHSRTPEYYPNAGLIMNYCRNPDPVAAPYCYTRDPSVRWEYCNL
TQCSDAEGTAVAPPTITPIPSLEAPSEQAPTEQRPGVQECYHGNGQSYQG
TYFITVTGRTCQAWSSMTPHSHSRTPAYYPNAGLIKNYCRNPDPVAAPWC
YTTDPSVRWEYCNLTRCSDAEWTAFVPPNVILAPSLEAFFEQALTEETPG
VQDCYYHYGQSYRGTYSTTVTGRTCQAWSSMTPHQHSRTPENYPNAGLTR
NYCRNPDAEIRPWCYTMDPSVRWEYCNLTQCLVTESSVLATLTVVPDPST
EASSEEAPTEQSPGVQDCYHGDGQSYRGSFSTTVTGRTCQSWSSMTPHWH
QRTTEYYPNGGLTRNYCRNPDAEISPWCYTMDPNVRWEYCNLTQCPVTES
SVLATSTAVSEQAPTEQSPTVQDCYHGDGQSYRGSFSTTVTGRTCQSWSS
MTPHWHQRTTEYYPNGGLTRNYCRNPDAEIRPWCYTMDPSVRWEYCNLTQ
CPVMESTLLTTPTVVPVPSTELPSEEAPTENSTGVQDCYRGDGQSYRGTL
STTITGRTCQSWSSMTPHWHRRIPLYYPNAGLTRNYCRNPDAEIRPWCYT
MDPSVRWEYCNLTRCPVTESSVLTTPTVAPVPSTEAPSEQAPPEKSPVVQ
DCYHGDGRSYRGISSTTVTGRTCQSWSSMIPHWHQRTPENYPNAGLTENY
CRNPDSGKQPWCYTTDPCVRWEYCNLTQCSETESGVLETPTVVPVPSMEA
HSEAAPTEQTPVVRQCYHGNGQSYRGTFSTTVTGRTCQSWSSMTPHRHQR
TPENYPNDGLTMNYCRNPDADTGPWCFTMDPSIRWEYCNLTRCSDTEGTV
VAPPTVIQVPSLGPPSEQDCMFGNGKGYRGKKATTVTGTPCQEWAAQEPH
RHSTFIPGTNKWAGLEKNYCRNPDGDINGPWCYTMNPRKLFDYCDIPLCA
SSSFDCGKPQVEPKKCPGSIVGGCVAHPHSWPWQVSLRTRFGKHFCGGTL
ISPEWVLTAAHCLKKSSRPSSYKVILGAHQEVNLESHVQEIEVSRLFLEP
TQADIALLKLSRPAVITDKVMPACLPSPDYMVTARTECYITGWGETQGTF
GTGLLKEAQLLVIENEVCNHYKYICAEHLARGTDSCQGDSGGPLVCFEKD
KYILQGVTSWGLGCARPNKPGVYARVSRFVTWIEGMMRNN.

[0031] By “lipoprotein(a) (LPA or LP(a)) polynucleotide” is meant a nucleic acid molecule encoding an LPA polypeptide, as well as the introns, exons, and regulatory sequences associated with its expression, or fragments thereof. In embodiments, an LPA polynucleotide is the genomic sequence, mRNA, or gene associated with and/or required for LPA expression. An exemplary map of a LPA polynucleotide sequence is provided at FIG. 2. An exemplary LPA nucleotide sequence from Homo Sapiens is provided below, where underlined text represents untranslated regions, regular text represents introns, and bold-faced text represents exons (Ensemble Transcript Accession No. ENST00000316300.10):

(SEQ ID NO: 427)
GTAAGTCAACAATGTCCTGGGATTGGGACACACTTTCTGGGCACTGCTGGCCAGTCCCAAAATGGAACAT
AAGGAAGTGGTTCTTCTACTTCTTTTATTTCTGAAATCAGGTAAGACATAGTTTTTTTAAATTATAAGAA
TTATTTTTTCTCCCACAATGTAGTAAAAATACATATGCCATGGCTTTATGTGCAATTCATTTAATTTTTG
ATTCATGAAATTCCCAGTTCAAAATCTTGTATATGATTGAAAAATTCTTAAAAAAATAAGTTTAATTTCC
CCGTGAAGACTGTCACGGTGCTGGAATGAATGGGCAGAAAAAATAATGGTTGATTTTTCTAATCTAAAAG
AGTGTGCCTACATGATGGCCAGTCTGGCTGAAAAATAAATAGCCATTGTAGCTAACTATGCAAAGGATGG
CTAAGCTCTTCGCTTGGTTCTCAGTTTCATTAATTTATATCATCTCTGTTCAGGTGCCATGCTCCCCTCA
CTAGCAAGTTGAAACAATGAAATAACTCTTTGAATATGTTTGGTTCCTTGACCTGTTCATGGAGTGGGAC
TCAGCATTTCTCTCTTTGTTATGGCCTGAGTAAGGCTTTCCATCGGTATACATTTGCTTCTTATCCCTGG
AGAAATTATACACATCCATTTGCCAGATGATATACGCATATAATGATTCAACAAATACTCAGGGTATTTG
TTGAGTGGGTTAGGTCCCCACATTTTTATACATACATACACACATACACACCGTGTGTGATTGTGAATGT
AAGTGTGTGTCCTTTACAAATACTAGCTTATTTAGCTCATGGTATAGGTAGGGTAGCATAGTCATCCCCA
TTTTATAAACAAAGAAATCTAGACTTAGGAAAATCATGTTATTTGTCTCGTGACCAAATTCCCAAATCAA
GGAAATAAAGAAACCTGGATTTAAGCCAGATTTCCAAGAAAAAATCTAGGGCTCTTCTCACTTTTTCATC
TTTGTTCCAACATTTGAAAAAATAAATCTAAACACATTCCAATGTAACTGAAGAGCAGGTTAATTGTTTG
CCACTTGCAGAATCCAATTAAGAAGAGAGAAGTCTGGTATAAAGAAAGTGATTTGCTTCCAAAGCTAGCT
TAGGGGAAGAAATGCAGCAGTCCTGCCGTACTACTTCACTTTAGGAGCAGAAAGTGGCACTTTTAAAAGG
CAACAGAGGAGGCGAGCAAGGATTCAGGGGTCCATGCTAGCTTGGGCACCTTATCCACCAGGTAGTTGAG
CAGTTGCCTGCTGGTGCCTTTGTGAGCAGGGTGTTGTCCCTTGAGGCAAATCTCTGGAGGGTGAGAGTTT
TGTAGTGGGCATGCTTTGGTTTATAAATCACCTGTGAACTCAGGAGTTCCATCTTGAAGCACATACATAG
TTAGATGAACTTGCCCTGCAGGGAGAGTCTGATGAAAGGGAGGTAGATGCTTGCAATTTAATCTATAAAT
TACCAGATAAAATTTTACAAGTTGACTTTAAAGTCAAACACATTTGAATTTAGTGGAAGCCATTCAAGAA
AATATCAAAGAAAATACAGAGCAGGAGAAGATTAAGCAAAGAGTTTTTTGGGGAAATTGGTGTCTATGTC
TGTGTGTGTAGGGAGTGCAGGGGATATGAATATTCTATTTCAGCCCATGGAAACTAGGATGTAGATCACT
GTGAACTTATTCAGCAGGCTACACCCAAAGGCTAGAACAAACTTCTCTGCCACAGGATTAACATATGTTT
TAATCGACCTGGGGGGCACATTCTCTGATAAGCTCTTTTGGAAAGCCAGGCTTTCTGTGGACGTGTTATC
TTTCCAATGTGTGCTGGAATGCCCGGGGAGAGGAAAAAGTTTCTTTTACAGCCATGCTCAGTGAGAAGCG
GAGAAACATCTTCTATTCACAAATTGCTAAGTCTTTTACACATGCAAATATGCATACACATTCACACACC
ACAGTGAGGAAGAAATTCTCACACCATTAATAAAATACATTTACTTCAGTAGCAATATACATCTACATTT
TGCCTATAATATAAAAGTATTTTTCCTATTAAAAGATTTGTTTAATGTTTCTTCACCAACAAATAAACCC
TATTAAATCCCCATTGCCATATGAGCCCTGGAGGTGAATCAGAGAAACAAAAGGATTGTGGAAAAATCAT
CAGGTTAAAAAAAGAAAAATTGATTCTGTTTTGGGATATTTCCTAGCAACATGAGCTGGGGAGGGGATCT
CAGCAGTGATGCTCTATGAAGCATAATAAAATGACACAGTTACAGGTAACTTAGTTAAAGGGGGAAATAA
ATGGAAGTTTCCTCTTTTTGAATATCAATTGTAGCCTGCTCTGCTACATTTCAAAAACACTCTTCAAAAT
GTTTAACTGAACTCACTGTAGGAAGCACCTTATTAATTTATTGTGTGTTTTGAAGTCACACTGTGAGCTA
TAGAATTTACCCAAGCACAACTCTTCCTGGAAAAGAGAGTTCAAATGAGAAACAGTGCGGGGTGAAGACA
TGGATATGGGCCTAAAATATCTATTTCTCAATGATATTTTGATATATCTATCAAGTGCTTTTTAGTGGAT
TAGGTTCAGAATGCATCAGCCAATGCCTGTTCAATAATCCAGTTTTCCAGCATAGAGCATATTAAATTGA
GGAAGGACAAAGTCACAGAGGTGGGGAGCAGGTGGACTGTGGCCAAGGACTTTGCATGAAACAGTGAGCG
TGCATCCTCCTCCTTGCCCTGCCCTCATGGTCTGTGTACTCTCAGGAGGTCAGGACAGGCCTTTCTGAGA
ATGAGAATCTGTTCATCTGCCTTTCTACTGGATACTTGTCATCGGCATACAAACACATGTTCTCTGCAGT
GTGTCATCTTTCAGAACCTCCCCTGACCCTGTATTCCCTAGAAGTCTCGCTGCTTTCAGAGCCAGGCTTC
TCTCCTGCTGCCACCCCCACTGCTCTTCTAGTCACTCTTTAACCCACTCCATCTGCATGTGGCCCCCACC
ACACCCCTCAAAGTGGTCAAGGTTGTCCTGTTGCTTAATTCCATGGAAGCTTGGCTATCTTCATTTTATT
AGCCTCTTTTGGCCTCTCACCCTGTGAAAATCACTACATTTTGTGCCAGAGATGGAGCTGGCATCTCCAG
GCTTGGAAGAGGGCTGCTGAAGCTCAGCCAGGTGTCCTAAGGAGCCTCAGGACAGGGGATGCTCAGTAGC
CTTGCAATGGGAACACAGCTGAGCCCCACTTGGCCACCCTTTGCCACAACCAGGCAGAAAGCAGCTTTTG
AACAGATTTGTTGCCTCAGATTTGATCTCAAAGAAAAATCGTGGGCAGTATTGGTCCCAGGTTCTGCTTT
TTTACAATTTCCTCTGAAATCTGGATGCCTATCAACACCTTGGAAAAACTGAATTCTCCCCAACTAATAG
TGGTGTGTCACTGTAGTAAGCCTAGTACAAAAATGGCCTTCTTTGTGGAGGAGCTTCATATCCTCCATTT
TTTTTTTGCTTAATTTTTGCCCAAGATGAGAACATAATTTAGTTCACTTTTTATTTATTCCCAACATCAT
CCATGCACCAACATTTTTGTAACTAAAGGAGGGACCATTCAGAAGATGCTTATCAACTGTCAAAGTGACA
GTGTTACAACCAATGCACATATTGTAAGAAATCAAACAATGGCCTCCAAGGTTCATTTCTACACAGGGAT
TAGCAGATCAACATCAATCTTGGCAACACAGTTGCCACTGATGGTGTCTTATTTTTTTTATCATGACATG
GCAATCAAGAGCAAACATGATTTATTCTTATTTAAGATTTTATGGTTAGACTAGGCAGATAGCTAGATAT
GAGCAGGAGGTGGAAGCCCCTGAGAGAATGGAGGTCTGGAGAATCTGAAACCCCAGAGATTACCCAAGTC
CTGCATGCTAGACATGAGTGGAGGAGGGGGAATACCTAGGTAGAAAAGAATGCCCCTTAAGATGCCCAGC
AGTCGCTCACTGTGCAGTTAACTTTTCAGAATGCTGCTAGATACATGCTGATAGGGAGGGAAGAGGGCAA
AGGAGAAATTCCTAAGAGATACACGGTTGCAGTTAGTATACATCTGAGTGCTATACAACCTTCTTTGGGT
GGTGGCAAGAAGCAATGCAGCCATTACGTAGAATTCATATCAAACACCTGTATCACAGGTGTTAAAGAAA
CAAGAAACATTGTACTTCTTGTATTCTTAATAATGATTTGCAATATTGTCTTTAGTATCACTGCAAACCT
CTATAAATATGATTTTTAAAAAGTATTTCTTTAGGTTGGAATTACTTCTACGCATTGACTTATCTTCCTG
GGTTTCATTAGCCGTACCCGTTGTACTTTCTTCCTTACCACTGTTTATCTCAAACTCTTGAGATTAAAGT
ATGGGCTCAGGAGGGAGCGAGGAGCTTCAGGACTCTCACGGACCTCCAGCACAGTGTAGCTGCCTTATGG
AAAAGTGGCCACACTGTTTTCTGCACTGGTCCCTGCCCCTACTATTCCTCACTGGGCAGAGCACAGCCAC
CCTGGCCCTGCCTGAACATTTTAGTCAGTGTTGGCTCTGTGCTTCTCTGGGGAGGAAATCCAAGAGACAA
CCCACAGCCCCTCTGCCATTTCAGCTGCAGCAGTACCACCGTTAATGCCCTTGGGCTTGAGAAAGAAGGG
ACCTGGCCACTTCCCTGACACCTCCAGCACACAGCAGGGAAAGAATTCCAGTTTCTCTTTCTTGTGAGCT
TTCACCTGCTACTCTTCACCAGGCAAGGCTCCTGGCTTGGGCCCACAGTGCAGGCACCTCGAACTCAGTT
GAACATTTCCACTGGCTGCACTCTGTGTTTTTGTGGGGTGAAGCTCCCAGAGGTGACTGAAAGTCCTTCT
GCCACTAACACTGCAGTCATACTGCCCTTGCTGTACTTGGACTAGGGAAGGAAAAAAGATCCTGAGTGCT
TTACTCACACCCCAGTGTGCCCCAGCCACCCTATGGAAAAGAGGCCAGTGTGTCATCCCTGCAAGCACCC
TGAGGCCCCTGCCCCTGCTGCCCCCAAGCTGTAGAGCCAGAATATAAAGCTGGCAGAAAAATGTAAAAAG
GCTAGACTGGCTTAGCCTCCCAGCCTACATCTTTCTCCTGTGCTGGATCCTTCCTGCTCTTGAACATCGG
ACTCCAAGTTCTTCAGCTGTGGGACTTGGACTGTCTTCCTTGCTCCTCAGATTGCAGGTGGCCTATTATG
GGACCTTGTAATCTTGTGAGTTAATACCACTTAATAAGCTCCCCTTTGTGTGAGTATATCTATATCTATA
GATAGATATAGGTATACTCACTATATATACACATATATACATATACTCTCTCTCTCTCTCTCTCATATAT
ATATATATATAATCTCCTATTAGTTCTGTCCCTCTAGAGAACCCCGACTAATACAGATTTTCATACCAGA
AGTGGTTCTTGAGGAACAGAATATTAAGGATGGAATTCTTTCATTGGTTTTGGGACTTCTGGTGTTGGCT
GATTAATATGATTAGACCAAAAAATGCTAAGGACTCTACTTCTAATAGTATGGAGAACACTGATAGTACT
TGGCCTGAATTGTTTAGAGAGTTATGCAAAATAAATGCATTTGACACTACTGATTCATCACTTATGAGAG
GCAAGGAGTTTAGTGACTCTATACATAATACCTTTGACTATATGTGGAGAACCAAGGAACATAATGAAGT
TGGTTGATTGCTCCTAAGTTCTCTGGAGAAAGAGATGAAAGAAAATGATGATCTCAGGGGATCTGTCTCC
CACCTTCAGAAGCAGATACTGAGCCACAAATCTGCTAAGATTGCCCTGAATGAGAGTTTTAACTCCTGTA
GAGAAAGAGTTGAAATTGTGAAAAAACAGAGACAAGCTGTTATCATGCGAGTAGCTGATCTGCAACAAGA
GGTGCATGCACAGCCTTGCCAGGTGTTTACTGTTAAAGTGAGGGCATTGACTGGAAAAAAATGGGACCCT
GGAACTTGGAGTGGGGATGTGTGGGAGAACCCTGATGAAGCTGAGGACACTGAGTTTGTGAACTCTGATG
AAACTTTTTTGCCAGAAGAAACAGTTTCCCCATCCCCAGTAGTGGTAACATCCCCTCCCTGACCCGTGCT
GCCATTAGCCTTTCCACCTTTGTCTGAGGATGTAAACCCTGCACTGCTTGAGGCAACAGTGATGGCCTTC
CCTGAGGCAGCTGCCAGGCAAGATAATGTTGATTCTCCTCAAGAGGCACCCCTAATGCCCCTGAATGCTT
CTAGACCTATAACTAGGCTAAATTCCTTGCGGGCCCCAGAGGTGAGGTTCAGAGTGTGACCCATGAGGAG
GTGCATTATACTCTAAAAGAACTGCTTAAGCTTTCTAATTTATATTGGCAGAAATCTGGAGAACAGGCAT
GGGAATGGATATTAAGGGTAAGGGATAATGGTGGAAGGGACATAGAGTTGGATCAAGCTGAATTTATTGG
TTTGGCCCTACTAAGTAGGGATTCTGCATTTAATGTTGCAGCTCGGGGACTTAGAAAAGGTTCTGATAGG
GCCGGGAGCAGTGGCTCACGCCTGTAATCCCAGCACCTTGGGAGGGGGGGGGGGGCAGATCACGAGATCA
GGAGATTGAGACAATTCTGGCTAAAATGGTGAAACCCCATCTCTGCTAAAAATACAAAAATTAGCTGGGC
ATGGTGATGCGTAACTGTAATCTCATCTACTTGGGAGGCTGAGGCAAGAGAACTGCTTGAACCTGTGAGG
CAGAGATTGCAGTGAGCCAAGATCGCCCCACTGCATTCCAGCCTGGTAACAGAGCAAGACTCCATTTCCA
AAAAAAAAAAAAAAAAAGTTATAATAGTTTATTTGCTTGGTTAGCTGAAATATGGATTAAAAGATGGTCC
AATGTTAGTGAGCTGGAAATGCCTTGGTTTAATGTAGAGGAAGTGATCCAAAGGCTTAGGGAGATTAGGA
TGGTGGAGTGGATTAGTCACTTTAGACCTACTCATCCCAGCTGGGAGGGTCCAGAAGATACACCCTTGGC
CGAAGCTTTGTGAAATAGATTTGTGAGAGCAGCACCTGTATTTTTGAAGAGCCCGTAATTGCTCTTCTCT
GTATGTCAGATCTAACAGTAGGAACCACAGTCACTCAACTACAAAATTTAAATACAATGGGAATAATTGG
ATCCTGAGGTGGCAGGGGCCAAGTGTTGGCACTGAACCATCAAAGGCAAGGTGGGCATAACTACCATAAT
AGACAGCAGAGGCAAAGCAGCCATCAGAATAGTCTGACTCATGTAGAGCTCTGGCATTGGCTAATTAATC
ATGGTGTTCCTAGAAGTGAAATTGATGGGAAACCTACTGTATTCCTACTTGATTTATATAAACAAAAAAC
TGCCAGGTAGAATGGACTAAAGACTAATCTGAATTATAAAAACAGAGAATCATGGGCCCTCAATCAATTT
CCAGACTCGAACCTGTTACAGTTCCAGAACCCACTGAATGAAGGGGAGGCTGGATCCCCTTGAGGAAGGA
CACCACTAGGCTACTGACAACTTATGCTGTTACTCTTTCTCCCATCCTTCCCTAAGGAGACCTCTGGCCT
TTTACCAGGGTAACTGTGTGTACTGGAGAAAGGGAAGTAATGAGACATTTCAGAAAGTACTGGACACTGG
CTCTGAGCTGACGTTGATTCCAGGGTACCCAAAACGTTATTGTGGTTCCCCAGTTAAAGTAGGGGCTTAT
GGAGGTTAGGTAATTAATGGAGTTTTAGCTCATTTCTGACTTACAGTGGTTCCAGTGGGTCCCTGGACTT
ATCCTCTGGTCATTTTCCCAGTGCCAAAATGCATAATTTGTATAGACATACTTATTAGCTGGCAGAAATG
CCACATTGGCTCCCTGACTGGTAGGATGAGGGCTATTATGGTGGGAAAGGCCAAACAGAAGCCATTAGAG
CTGTCTCTACCTAGAAAAATAAAAAAATCAAAAACAATATCCCATCCCTGGAGGGACTGAAGTGATTAGT
GTCACCATCAAGGACTTGAAAGACGCAGGGGTGGTGATTCCCACCACATCCCTGTTCAACTCTCCCATTT
GACCTGTGCAGAGGACAGATGGATCTTGGAAAATGATGGTGGATTATTTTAAGCTTAACCAAGTGGTGAC
TCCAATTGCAGCTGCTCTACCAGTTGTGGTTTTGTTGCTTGAGCAAATTAACACATCTCCTGGTGCCTGG
TATGCAGCCATTGGCTTGGCAAGTGGCTTTTTCTCCATTCCTGTCCATAAGACCCACCAGAAGCAATTTG
CCTTCAGCTGACAAGGCCAGCATTATACCTTTACCACCCTACCTCAGGGGTGTATCAACTCTCCAGCTTT
GTGTCATAATCTTATTTGGAGAGACCTTGCTCGCTTTTCACTTCCACGAGATATAACACTGGTCCATTAC
ATTCATGACATTATGATGATTGGATACAGTGAGCAAGAAGTAGCAAACACACTGAACTTATTGGTGAGAC
ATTTGTATGCCAGAGGATGGGAAATAAATCCAGCTAAAATTTAGGGACTTTCTACCTCGGTAAAATTTCT
AGGGTTCCAGTGGCATGAGACCTATGGAGATATTCCTTCTAAGGTGAAGCATAACTTGCTGCGTTTGGCC
CCTCTTACAACCAAGAAAGAGGCACAATGCCTGGTGGGCCTATTTGGATTTTGGAGGCAACACATTCCTC
GTTTGGGTGTGTTACTCTGGCCCATTTATCGAGTGACCTGAAAGGCTGCCAGATTTAAGTGCAGTCTAGA
ACAAAAGAAGGCTCTGAAACAGGTCCAGGCTGCTGTGAAAGCTGCTCTGCCATTTGGGCCACATGACCCC
GCAGATCCAATGGTGCTTGAGGTGTCAGTGGCAGATAGGGATGCTGTTTGGAGCCTTTGGCAGGCCCCCA
TAGGTGAATCACAGTGGAGACCTCTAGGATTTTGGAGCAAGGCCCTGCCACTTCTGCAGATAACTACTCT
CCTTTTGAGAGACAGCTATTGGTCTGTTATTGGGCTTTGGTGGTAACTGAACGTTTGACTGTGGGTCATA
AAGTCACCATGCTACCTGAACCTGCCTATCATGAACTGGTTGCTTTCTGACCCATCTAGCCATGAAGTGG
GTCAGCACAGCGGCATTTCATCATCAAATTGAAGTGGTGTGTATGTGATCGGGCTTGAGCAGGTCCTGAA
GGCACAAGTAAGTTACATAAGGAAGTGGCTCAAATGCCCATGTTCTCCACTCATGCCACCCTGCCTTCCC
TCCCCCAGCCTGCACCAATGGCCTCATGGGGAGTTCCCTATGATCAGTTGACAGAGGAAGGGAAGACTAA
GGACTGGTTCATAGATGGTTCTGCACGATATGCAGGCACCACCCGAAAGTGGACAGCTGCAGCACTATAT
CCACTTTCTAAATGCATGTGTACACTTGTGCTAAGAAAATATCTTTATTTTATTTCCTTTATTTTTCCTT
TATCATGTGACCTTAGATTTATGGACTTCACATCAGCATTTAAGCATTTAAGTGTTGTTCATATCAGCAT
TTAAATATTGTTAACCTTATGTAATAACTTTTGGTTTGGGGATTGGTGCGTTTCTGGTTGTATGAGGATA
GTTGTATTATATTAGGCATAATTATGACCTTATTATTGTCTTTATTTGAAGATTATGTATGATTTCAGGA
TGTGTGTATGGGTTCAAGTTGACAAGGAGTTGGACTTGTGATGGTTAATACTGTCAACTTGATTGGATTG
AAAGATGCAAAGTATTAATCTCGGTTATGTCTGTGAGGGTGTGGCAAAAGGAGATTAACATTTGAGTCAG
TGGGCTGGGAAGGCAGACCCACCCTTAATCTGGGTACACACCATCTAATCAAGTTCCAGTGTGGCCAGAT
TGTAAAGCAGGGAGAAAAATGTGAAAAGACTAGACTGAATTAGCTTCCCAGCCTACATCTTTCTCCTGTG
CCAAATGCTTCCTGCTCTTGAACATCGGACTCCAAGTTCTTCAGCGTTGGGAGTTGGACTGGCTTTCTTG
CTCCTCAGCTTGCAGAGGGCCTGTTGTGGAACCTTGTGATCCGCTGAGTTAATACTACTTAATAAGATCC
CCTTTATATACATATAATATATTATATTATATATAATATATATAATATATATTATATATAATATATATAA
TATATTATATATTATATATAATATATATTATATATTATATATAATATATATTATATATAATATATATTAT
ATATTATATATTATATATAATATATATTATATATAATATATATAAAATATATATATATCCTATTAGTTCT
GTCCCTCTAGAGAACCCTGACTAATACAATTTATGTCATTAATCTCATTTATTGATTTGTATACATTGAA
CCAACCTTATATCCCAGGAATAAAACCTACTTGATTGTGGTGGATTAGCTTTTTGATGTACTCTTGGATT
CAATTGCTGGTATTTTATTGAGAATTTTTGCATCTGTGTTCATCAAGGATATTGGCTTGAAGTTTTCTTT
TTTTGTTGTTCCATATCAGAATGATGACGACCTCATAGAATGAGTTAGTCTGTCCTCTTTTATCTTTTGG
AATTGTTTCAGGAGGCTTGATATCAGCTCTTCTTTATATGACTGGTATACTTTGGCTAGGAATCTCTCTG
GTCCAGGGGTTTTTCTGGTGTAGGTTTTTAATTACTGATTCAACTTCAGAACTCATTACTCATTATTGAG
TTCTAAAACTCACTTTCATGTACTCTTCAAAAGACTGTCTTCTTCTGTTGTTGAGCGGGGTGTTCTCTCA
AGGTCGTTTAGGTGAAGGTGGTTGCTGGTGTTCTTCTGTATCCTTACTGCTTGTCTTTCTCTTTTTTTAT
TGACTACTGAGGATTAATGGTGATGTGTCCAACTTTAACTCTAGATTAGTCTATTTCTCTTTTAGATTGT
AACTCTGTTTTATATATTTTGAAGCTCTGTTGTTAGGCATGTGTATTTGGATTGTTAGGTCTTCTTGATG
ATGACCTTTATCATTATGTAATGTTTCTTCTTATCTCTGGAAGTATTCGTTGTTCTGAAGTCTATTTGTG
CTGATATGAATACAGCCTTCACAGCTCTATTTTCACTAGTATTTGTATATCTTTTTCTCAGCTTTTAAAT
TGAGATGTTCAGACCATTTGCATTAAAGTAGTTGTTAATAGGATTAAATTTAAATCTACCATTAAGTTGG
TTATTTCTCTTTGTCCCATTTAAACTTTGTTCCTTTTTTCATATTTTTCTGCCTTCATTTATATTGAGTT
TATCTCCACGACTTACTTATTAAATTAATTTTTAATGGTTTTAGTATTTTCCACAATGTTTATAATATAT
ACTTTGATTTTTTCACATTCCACCTTCAAATGACAGAATTATACTGGATATATAGAAATCTTACATCATT
GCACTTCTCCTTCCTCCCTCTCAAAATGTTGTGCTATTGCTCTTTGTAATAGAGGCTTACTTCTATTATG
TTATAGCTCTCATAATACATTGACACTATTTTTACCCTGAATAATCAGTTGTTTTTTAAAGTGATTATGA
CTACAAATATTTTGAATAATTTCTTTATTTTACCATTTCTGGTGCTCCTTATCTTTTACAGTAGATCCCA
ATTTCCATCTGGAGTCACATTCTTTCTGTGAAAAACAACCTTTAGCATTTCTTATAGCACGGGACTGCTG
TTGCTGTTGTCTTTCAGCTTTTCTTTGTCTGAAGAAGTCTTTATTTTGCCTTCAGTTTTTAAAAGTGATT
TTGCTGAGTATAGATACTGGGTTGAGAGTTTCATTCCTTGTATCATTTTAACAATGATGTTCCATTATAT
TCCGTTTTGAATAGTTTCTGACTAGAAATCTGATCTTTGTTTCTTTGTATTCAATAGTTCCTTTTTCTCT
GACTGCCTTTAAGATATTCTCATCTTTGTTTTTCAACAGTTTGACTATAATTTGTTTATTATTAACTTTT
TGTATTTATTCTGCTTGAGGTTTCCTGAGCTCCTTGGATTTGCAGATTGTTGATTTTTATTGTTTTTGTA
AAATTCATAGCCATTATCTATTCTACTGTTTTGTTTTTTTTTTCACTTCTCTCTCTCTGTATTCTTCTTT
TTGGACTGTAAGTATTCAAATGTTAGATCATTCATATTGCTTCATAAACCTTATATGCTTCTTCTGCTTT
TTTTTTTTTGTCAGGAACTCTTTTTTTGTATCTGTGTTGGTTTGGATAAGTTCTAGTAGACTATGTTCAA
GTTTATGGATTATTTTGTTAGTTGTGTCTAATTGACTCCTCAGTGCATTCAGAGAATTCTTCATCTCTGA
TATTATAAATCTCTTCCTAGCATTTTCATGTTACTCTTTTCTATAGTTTCCATCTCTTTGCTGAAATTCT
CCCCCTATCCATGGATATTGTCCACCTTTACCACAAGATTCTTTAACATATTAACATAGGTATCATACAA
ACCCAAACTGATAGTTTCCAGATGGTGTCTTTTCTGAGTCTGTCTGTCTTGATTGCTTTATTATTTAACA
GTGACTTATCTTCCCTCTTCAGCTTTTGGTGTGTCTTGTAATTGTTTAATCAAACACTGGGTATCATAAA
TGGAGGAACAGTAGAGATTGCAGTAAATATTATTTATGCTTTGAAATGGGCACCCATCTTCTGTTGAAAA
TATGTTTTGTGGTCAATTGAGTCAACCTAGTAACTGGTTGAACTGAATTTGGCATTTGTGCTTGTTGCTT
TTATCTTAAATGCACCACAGGTTTAAATTCCTCCAGTGATGGGTTGCTGCTATCTTTTGCTTAGAGTGGG
GCCTGGGGTGTGGAAGAATTTTCTCAGTGTTCCTATCTATTATTAGATTTTAGCAGTCACTGCATGCCTG
CACTACAGAGGGGATATCTTCATACACATAATCTAACCCCATTGAAACTGCTGTTTCTTCTTAATGAATG
CTCAATCTTTGGTGGAAATAAACAAATGCTGTATCTCCTGGAGCCACTTCAGTCTTAGTCAGGTTCTGCA
GGGCTTTGAAGGGAATGCATTCTCAGTATTCTTGTGCCTTATTTGGATGGAACTTGAACCTGTGGTGGGT
TTGGAGAGAAAGAGTAGCAGACGTCTGCTATGTTGCAATGCAGGATGCTGGGCACAAGAAAATTTCCAGT
CTCTCCTCCAAGGAAATAAGATTTGATCATCTACCTATCCCTGAGAAGTGAAGGGCTTTGCCTGCGGTGC
TAGATGCAAAACCATTTTTCTCCCCCCATTGCCCAGAAACTTAAGGCTTTGGCTTTTCTGAGCAGTGGTC
TAGGGAATTGTGCAAGGTTTTCATATTTGACCCTGACAGCCCATCACCACCTACAGCTTGCAGTGCCAAA
TGTATCTCCCTCTGATCTCTCCTGTCCTGTGGTCCTCATGAACATTAAGAAGAGATTTCTAAAAAAGAGC
TTGCACATGAGCATAGTTTCTGGTGAGAAGAATTCTGATATGTTAACTTCCTCTAAACTTTTAAATAAAA
TATTTCTAAGAATTAAATAAAGTTCTAGAATGATATGAATCTATTCCTTTGGTTTTTTGCACGTCTGTCT
GCCTGCTAATCAAGAGAAGAGAATGGTCGTAATTCTCAGAGACTTTTTCCTGTTTGTGTCATAAATGACT
TCACATTTTTTTCTGTTCTAAGAACTATTCAGCTTGATTTCTTCTGTTTTAATTTTAGCAGCACCTGAGC
AAAGCCATGTGGTCCAGGATTGCTACCATGGTGATGGACAGAGTTATCGAGGCACGTACTCCACCACTGT
CACAGGAAGGACCTGCCAAGCTTGGTCATCTATGACACCACATCAACATAATAGGACCACAGAAAACTAC
CCAAATGCGTATGTCATTAATCTTACAGTAAGCAAAACAAGGTCCAAGTAAAATTTGTCTTAGAAAAGGT
GTGCGTCAAGCTAACTTCTTATGATTAAATTTTTCTCACACATAGAATGCATGGCAAAATGTCTGAGAAA
CATTACTTTGAGCAAAGAGTATGATAGAAGAGAAATGTTAAGCTGGCTCTCTTTCCTGAGAGTTTGATAA
AATCAGGAGAATATCTGGCGGTGGTGAGGCCACAATAATGGAAAATCAGAATGTTTAGACAGAGTCAGCT
TCAACAACACTCACTAAAGGTCAATGTGATCTTTACCCCTTGAAATTCTATAATTCTAATCTCCAATTCC
TGAAGTGAAGGTTGTGTTGGCCTTTTCTGTCTTGGCTCACAAGTAAATGATATGTGCATATCTATGGAAA
GGCGAATCTATCTTTTTCTATATCTATGTCTATTCCAACGGGTAGAAACACCCTGGGTCCTGAGCACCAG
TGGTCTGAAGGAATACGGGTTGCCAGGAAGAGAGAAGCAAAGGCAGGAAGGCAGATGAAAGTAAGAAATG
AGACAGATGCTAAACAATAAAAAGTGCGGGAAGATAGACAGAAGCTGGGGTCTGACCACACCATGGCCAG
TCTTTCACACATAAGTGACTACCAAAGACAAGAAAAAATGATTTCCGCTTGTTGGACAATAGATGGTAGA
GGACCAAGGGAATTGCGAGAGAGAGAACAATGAGATCAACTCAACAGATGCACTGGTTTTCTTCCTGGAG
ACCCTTCCTGCACTGAAGGGCAGGAGATGGAGCCCAAAAAAAACTGTAGCCATCTTGCTGAACAGAGGAG
GGACATTGGAGTTTGGGATTATTCAGGTGGCTAGGATTTTCTAGGCCTGCTAACAATGAGAACAGATTTG
TGGAGGAAAGGAGTTCTAGAAATATGCATAGAAATCTCCTCGAGTCATTGGCTAAACATGAAGCTGCATG
TACACAGAAAATAGATCCACAAGAAAGTAGGGCAAAGAACATCTACGGAAGAGCAGCAACTACAATGGAA
CAGTGAGCTCAATAAACATGACAGAGCTCAAATAGCACTAAGGGATATTGGAGTTTGGACCACACAGAGG
AGAGAGACTTCACTGAACATCTTGGGCATTCAGTAGAGACCCAGGAAAAGCCATACTTTAGGAGTAGAAT
TAGTATATTCTTAGAATAAAGGCAGCTCCACACAAACAATAGCAAAACTGAAAAGGAAGTCTCCAAGCAT
CAGAATGATGTCCAAGTCAATGAACTGCCTCTGAGAGGAAAACTCAACCATCTTTAGAGGTAAACATCAA
AGTCAAGTGGCTCAGCTATGCAGTATCCACAGTGTGAGGCCTAAATATAAAACTTGACTACACATAGAAA
CCTTTTAGTGTGACCCACAAGCAGGAGGAAAATCAGCCAATACAAACAGACCCAGAAGAGACAGAAATGA
TTAGAATGGCATAAAAATTTGACATATCACTATATAATAATTGAGTTCTAGGATTTAAGAAAACATGAAT
ATAGAATGCAACAGACACCTTATCCAGAGACAGTAAGAGTATAAAGAGCCAAATCGAAGAACTACTAAGA
GATATGTCTTAAATGAAAAAATTACTAGATGGCCTCCCCATCTAGTTAGACATTTCAGAAGAAAATACCA
AATGAAAAATAATTGCATAGAACCTACAGAACCAGATACACACATACAAAACACACGCATGCATACACAC
ACACTCAAACATGTATAAGCTTACAAACACACACACACATCCACAAATGCTGAAAAATGAAATCAACCGA
GCCACACAGACATAAAGGAAAACATAAAAAGATTTCCTACATGTGGGAAGCAAGTCACAGAAAGGGGGAA
GGAGATTGGAACAGAAATATATACTGAAAGCAAGGATGGCTGAAAATTTTCCAAATATAAAGAAGATTAA
AAAATCACGGACTCAAGAAGCTCAATGGATCAGAAAAATAATTTCTAAAATGACAATTATAGGATGCCAC
TGGGTACATAGCAGTTCAACTGTCAGAGGGCAAAGACATAATACACAGAAAAATCTCGTAAGGAACGGGA
AAAACAAAAAGCTGTGTCTTGCTAGAGGAACAGTGATACAAGTGACTAATGTGTTCCCATCAGAAACACT
GCAACCTGGACACAAAAGAATAACATTAAAGTAATAAACGTAAGAAAGAAGAGCTCAACTGAGAAGGCTA
CATCCAGCAATAAAATGCCTTGAAGTTCATCCATGTTGGAGGAATGCACATTGTGCACTCCCCTAAACAA
AGAAACCGGAAACTGTAAGACTTTGGAATCAGCAGGCTTATGTAACAAAAGAGGTGACCCTAAGGAATTA
AGGAGAAGAAGAATAGAACAAGAAGGGAACTTTCTGCAGCCTATATAATGAAGAACCTAGCAATTGGCAA
ATGTAGATGAAAATGCTACATGTTTTCTTGATCAAACGTTTATATCTTTTTAAATGAGAGTTGACGAGTT
GAAGCAAAATGATACCAATATATTTAACTTTACCATATGTAGAAGTAAAAATTTGAACATGTAGCATAAA
TCATGTAGGGATTAATTGGAAGTGTACCACTGTAAGTTTCTTACCTCATGCACGATAGTATGTAATACTA
ATAAAAGGTTAATGTGTGGGTTCAAAGGGATATTGCAAATCCTAGAGCAATCACAAAGTTTTTAACTCTG
AGGTTTGTTGTATAATAACAATATTTTATGTATTCAAAAGAGGGAAGCCAAGGAAGAAAAAAAAGTCTTT
AAAGAGCTCTGGCTCTTAGTACATCCAGTTGCTCATTGAATGAGCTTCCTGGAATGGAGGGTCTGGGACT
GAGACTAGGCCACATGTGTAGAGCCACTAGAGACACAATGTTGGATCCCCATGGCCCATAATACATTTCC
CATTTTCTCAGGCAGCCACAGGTCATGAATGTGAGGATACTGAGAGGTTGGAGCAACGTTCTTGGGAGGC
ATAAGGAAGAGCGAATGCTTCAAGATCCCCGCAGCCCAAACTCCTCAGCTGCTTTGCCTCCTAATTCATT
GTTTTTTGCTCCTCCATAGCTGTCCGACCTCTTCAGATCTCTTAGTCTTCCTGCCATCTTCCTTTATGCC
ATGGGACCCACTGTTCTTTCAACTCATCCCCCAGTTCTGGAGTGGCTGTGGACAGCAGAGGATAGACTGA
GAGCAGGAGAGAAGGTCCTGCCCAGGAACCCATTCTAGAGATACTGCATTCTGCCTGGGAGCAAGTTTTC
CAGGGCAGCTTTGAGAAGTCTTGCAGAAACAAACCTACTTGACCGACATGATATGGGAATGACAGACAGT
AATACTATTTGCACAATGCTTTTCCATGGGAAAGGTAGAGCCTTTTCACTAGGTTTTGAGTACATGGAGT
GTGAGAGTTGACCTGGAAAGGTTATCCTCCTTGATGCCATGTTTTCTCTGAAGAACTACATGTTCGTTGC
AACTCCCACATTAGAATATGAAGTCCTACCGAGAGAGATACGGAGACTAGACAGATACAGATGCATTTGC
ATGTGAATACACAATCCCACAATACAGACGTCAAAACCCATACCAGTTATTCCAGAGAGATGGATTGGGC
AGAAGGCAGAAGGAGAATACTCTGATCGTTTTTCGGCCACGTGTGTGTGTTATCTCAGTGTTTCTAAGAA
GCGTTTGCTACTTTAGATTTTTTATTTAAAAAAAATAGTAATAATCTATTAAGTATGAGAGATGTGCAGA
GAGGATTAGTGATCGAGAGCCATTTTTGCTGGTGGCAATCATATGGTACTTTTAATGGGAATATTAGAAA
GGCACCGGTAATGACCTTGTTGCAGCACAAAGGAGAGAGTGTGGGGTGCCCCTGCATGTTGTCCCACCTC
TTGTGACGTGTATCGTTTTGGAATTTCCAGTGGCTTGATCATGAACTACTGCAGGAATCCAGATGCTGTG
GCAGCTCCTTATTGTTATACGAGGGATCCCGGTGTCAGGTGGGAGTACTGCAACCTGACGCAATGCTCAG
ACGCAGAAGGGACTGCCGTCGCGCCTCCGACTGTTACCCCGGTTCCAAGCCTAGAGGCTCCTTCCGAACA
AGGTAAGGAGTCTGTGGCCAGACATCTACACGCTTCGATGCTGGGATGAAAAGCCATGGAAATTCCCACT
GATGCAGCCGCCTTCAATGGTAAACGGATGCTCGAGTGTTGCCTGAGTTCTACCATGTAGGAGGAAGCCT
CCGTGCACTCTCTGGGGGAGCCAGCGGAGTGATTTCTGGTGCAACGTGGTTGGGCTTTGTCTTTAGGATG
GGCACAAACCCTCCAGGGGGATCGACTTCAAAATTCACCTTGTTGTAAAACGGGCTACCTCAGTGTCCCA
GCCAAAATTTTTATTGTAACATGCTGTCAGGTGTGTCACTCTTTCCAAGCCAGTAAGCTTTTCCGGGGAT
TTCTTCAAGTAGCCAGCATTCAGAGCAATCTTCAGCATTGCAGATTCTGAGAAATGTGGCTCTGGAGCCT
GTCACCCTCGAGAAACCTAAGAGGGCTGCATTGATTCCATGTGGCCCTGGGTCTATGGAGCAGTACATGA
GCTCCCAGTGCTCTAAGGCTCTTCAGCCCTAGGCTTTGAAGGGAGTGATTTCTCAGTATTCTTAAACCTC
TTTCTGATGACACTTGTACCTGTGAGGGGTCTAGAGAGAAAGAGTAGTAGACTCCTACTTTACTACAATT
CAGGATGCAGGGCATGAGAGGATTCCCTCTCTCCTCCAAGGGAAGAAGCTTTTGGCGTGCACACATCCCT
GAGAAGCAAAGTGTCTTTGTCTTCAGTCAGATACATAGGACCGTTTTCTGCCCCATGGCCCGGAAGCCAA
AGGCCTTGGCTTTCATGATCAACGGTCTAGGGAAACATGCAAAATTTCCATGTCTGTCCCAAACTCTGCC
CCCGACAGCCAATTACCACCTGCAGCCCGCATTGCCAAATGCGGTGCCGTTTGCATGAAGATTCAGTAGA
GTTTCCTAGAAAGGTGCTACCTCGTGAGCTCACTTTCCAATGAGGAATCTGATCTGTTGTGTTTCTCTAA
GGTGTCAGGTGAAATATTTCCAAGAACTTACTACAGTTCTAGAATGGGAGGAATCTGTTGCTTTGGTGTT
TGTTTGTTGGTCGGTTTTCTCACATCCATCTGCCTATGGATAAGGAAAAGAGAACGGTCGTAATTCTCAT
AGACTCCTTTCTGGTTGTGTCACAAATGGCTTCACATGTTTCTCTATGCTCAGAGATACTCAGCTTGATT
TCCCGTGTTTTCATTTCAGCACCGACTGAGCAAAGGCCTGGGGTGCAGGAGTGCTACCATGGTAATGGAC
AGAGTTATCGAGGCACATACTCCACCACTGTCACAGGAAGAACCTGCCAAGCTTGGTCATCTATGACACC
ACACTCGCATAGTCGGACCCCAGAATACTACCCAAATGCGTATGTCTTTGTTCTTTACCATAAGAGAAGA
AAGGGCCAAGTGAAGTTTCTGTTACAAGAGATGTGTCTCAAGCTGAGTTCTCCGAACTCAACTTGTGACA
GATGCAGATGGCGTAGCAAAATGTCTCAGGATGATTGCCTTGGAGCTAAGGGTCTGAGAGAAGGGAAATG
TTAAGCTCCCTCTCCTTCCTCCTAGTTCTATTGAGCAGAAGGGAAATCTGGAGGTGAGGAGATCACATTA
TGAAGAAAGTCAGAATGACAAAGGACCAGACACTTAGATTACCCTTCCACAACACCAACTAAACGTCAAT
GGAGACTTTCCAGTTGGAATTCCGTTATTCTGGCTTCCACTTCCTGAAGGGAAGGTTGCGTTTGCCTTTT
CTCTCTGGGTTCAAGAGGAAAGAATAGGTGCTTATTTATGGACAGGTGAATTGATCTGTTTCTATATCTA
CGTATATTCCGATTGTCAGAAAAACACTCGTTCCTAAGTACCAGTGGCCTGAAGGGATACAGGTTCCCAG
CAAGAGAAGATCCAAGGAAGGAAGGCAGATGAGAGTCAGCACAGAGAGGGATGCTGAAAAGTAAAAGGGA
TGGGTGGATGGAGAGAAGCCCGGGTCTGACCACCCAATGGCCAATATTTTGGCCACAAGCGACTACCAGA
GACATGGAAAAATGGTTTCTACATGTGGGACAACAGATGGTAGAGGACCTAGAGAATTGAGAGAGGGGCA
ATGATGGGCTCCACTCCGCAGATGCCTTGGCTTTCTTCCTGGATACCCTTCCTGCACTGAATAGCAAGGA
GATGGAGCCCAAGCAGACTGTAGCCATCTTGCTGAATGGAGGAGAGGGATTGGAGTTTGGGATGACTGTG
GTAGCTGAAATTTTTCTAGGTCTGCTAGAAATAAGAACTGGTTTGTGTGGAGGAAAAGAGCTCTACAAAT
ACGCATAGAAGTCTCCTCCAGTCGTTGGCCTGACATGACGCTGCCTGTGCACAGGAAATGGTTCCACGAG
AAAGTGTGGCAAAGAACATTTACTGAGAAACAGCAAGTACAAGAGCACAGGAAGCTCAATAAAGAAGAGA
GAGATCACATAGCACTCTGGGATACTGGAGTTCTTCCCAGCTAGACCAGAGAGTCCTCACGGAGCACATT
GCCAATTCAGTGGAGACCCCAGAACAGCCGTAATTTAAAGGTACACTTAGTATATTACTAGAATAAAGTC
AGCTGCAGACAACCCCTTGCACAGCTGGAAAGCAAGTGTCCAAGCATCAAATCGGTTTCCAATCAATGAA
GTGCCTGTGAGAGGAAATCTCAACTCTCTTTAGAAGTAAACAACAAAGTCGATTGCCTCAGCTATGCGGT
ATCCGCAGAGTGAGTCCTAAATTTAAAATCTGACTACATGTAGAAAAGCGTTTCGTGTGACCCATGACCA
GGAAATAAATCGGGTAATACAAACAGGCTCAGGAATGAGAGAAATGATTAGAATTGCGTGAAAATTTGAC
ATATCAGTATGATAACTGATTTCAAATATTTAAAAAAACAACATGCAAGAAAGCAGATATCATATCAAGA
GAAATTAACAGTACAGAATAGCCAAATTAAATTAAAGAGGTAGTATAAAAAAAGTATGTCTTAATTGAAA
AAAATTACTGTATGGCCGGCTGATCAATTTAGACGTTTCAGAGGAAAACATTACCCAACACACAATTCTA
GAGAACCTACAGAATGAGCTACACACACACACACACACACACACACACACACTGAAAACACACCCATACT
CACACACACGCAGAAACTCACAAGTTCTAACACACACAGACACGCGCACCCCTGAAGAAACAGTGAAATA
TAAAATTAAGCGAGCCTCACAGACATGTAGGAAAATATGAAAAGATTTCCTGCATGTGGGAAGCAAGTCA
CAGTAAAGAGCAAGGGAGTTTATAATAGAAACAAATACCAGAATCAAGGATGGCTGATAACTTTTCAATT
ACGAAGAACATTAAAAAAAATCACAGAATCGTGAAACTCAAGGGATCATATAGGGAATTTCGGAAAAAAA
ACCCAACCTGTATGATGTACTTTTGTACATCACAGTTCGAAGGTAACAAGGCAAAGATGTAATAAGAAGA
AACCTGTCACGAGAAACTGGAGGAAAAAGAGCTGTGTCTTCCTACAAGTACACTGATACAAATTGCCAAT
GTGTTCACCTCAGAAACACTGGAAGCCAGATACCAGGGAATATTGTTAAAATGATAATCAGGAACAAAAA
GAGATCAACCGGGAATGCTGAATCCAGCAATAAAATGCCTTGAAGGTCATCCATGTCGGATAAATGCATA
TTGTGCACTGCCCCAAAGAAAGAAACCGGAAACTGTAAGAATTGGAAATCAGCAGGCTTATGTAACAAGA
GAGGTGACCCGAAGGAATTAGGTAGAAGAAGAATTGAACAAGAAAGGAACTTTCTGCAGCCCACGTAATG
AAGAATCCAGCAATTGGCAAATGTAGATAGATGTAAATGCAAAATATTTTCTTGATCAAATTTCTATATC
TTTGTAAATGAGAGTTGACTACTTGAAACAAAATGATAGCAAGATATTTAACTTCAGCATATGTAGAGGT
AAGAATTTGAAATGGTAGCATAAATCACGAAGGGATTAATTCGAAGTGTACCGTTGTAAGTTTCTTTACC
TCATGCACGATGGTGTGTCATATTAATAAAAGGGTACTGTGCGGGTTCGAAGGGATATTGCAAATCCTAG
AGCAATCACAAAGGTTTGAACTCTGAGGTTTTTGGTATAATAAGAATAGTCCATGCATTCAAAAGAGGGA
AGCCAAGGAAGAACTAGAAGTCTTTCAAGAGCTCAGGCTCTTATACATCCAGTTGCTCATTGAACCAGCT
TCCTGGAATGGAGGGTCTGGGGTTGAGACTAGGCCACAAGTCTAGAGTCTCTAGAGAGACAGTGTTGGAA
CCCCATGGCCCATAATACATTTCCCATTTTCTCAGGCAGCCAGAGGTCATGAATGTGAGGATACTGGGAG
GTTGGAGCAACGTTCTTGGGAGGCATAAGGAAGAGCGAATGCTTCAAGATCCCCGCAGCCCAAACTACTC
GCCTGCTTTGCCCCCTAATGCATTTTTCTCTGCTGCTCCGTAGCTGTCCGACCTCTTCAGATCTCTTAGT
CCACCCTGCCGTCTTCCTTTATGCCATGGGTCCCACTGTTCTTTCAACTCATCCCCCTTTCCCTCAGTCC
CGGAGTAGCTGCGGCCAGCAGAGGGTAGACTGAGAGCAGGAGAGAAGGACCTGCCTAGGAACCCCTTCTA
GAGATACTGCATCCTGCCTGGGAGCAAGTTTTCCAGGGCAGCTTTGAGAAGTCTTGGAGAAACAAACCTA
CTAAACCTGACAGACAGTAATACTATTTGCACAATGCTTTTCTGTGGGAAAGGTAGAGCCTTTTCACTAC
GTATTGAGTACATAGAGTGTGAGGGTTGACCTGGAACGGCTATCCTCCTGGATGACGTGTGTTTTCTGAA
GAACTACATGTTCGTTGCAACTCCCACATTAGAATATGAAGTCCTACCGAGAGAGATACGGAGACTAGAC
AGATACAGATGCATTTGCATGTGAATACACAATCCCACAATACAGACGTCAAAACCCATACCAGTTATTC
CAGAGAGATGGATTGGGCAGAAGGCAGAAGGAGAATACTCTGATCGTTTTTCGGCCACGTGTGTGTGTTA
TCTCAGTGTTTCTAAGAAGCGTTTGCTACTTTAGATTTTTTATTTAAAAAAATAGTAATAATCTATTAAG
TATGAGAGATGTGCAGAGAGGATTAGTGATCGAGAGCCATTTTTGCTGGTGGCAATCATATGGTACTTTT
AATGGGAATATTAGAAAGGCACCGGTAATGACCTTGTTGCAGCACAAAGGAGAGAGTGTGGGGTGCCCCT
GCATGTTGTCCCACCTCTTGTGACGTGTATCGTTTTGGAATTTCCAGTGGCTTGATCATGAACTACTGCA
GGAATCCAGATGCTGTGGCAGCTCCTTATTGTTATACGAGGGATCCCGGTGTCAGGTGGGAGTACTGCAA
CCTGACGCAATGCTCAGACGCAGAAGGGACTGCCGTCGCGCCTCCGACTGTTACCCCGGTTCCAAGCCTA
GAGGCTCCTTCCGAACAAGGTAAGGAGTCTGTGGCCAGACATCTACACGCTTCGATGCTGGGATGAAAAG
CCATGGAAATTCCCACTGATGCAGCCGCCTTCAATGGTAAACGGATGCTCGAGTGTTGCCTGAGTTCTAC
CATGTAGGAGGAAGCCTCCGTGCACTCTCTGGGGGAGCCAGCGGAGTGATTTCTGGTGCAACGTGGTTGG
GCTTTGTCTTTAGGATGGGCACAAACCCTCCAGGGGGATCGACTTCAAAATTCACCTTGTTGTAAAACGG
GCTACCTCAGTGTCCCAGCCAAAATTTTTATTGTAACATGCTGTCAGGTGTGTCACTCTTTCCAAGCCAG
TAAGCTTTTCCGGGGATTTCTTCAAGTAGCCAGCATTCAGAGCAATCTTCAGCATTGCAGATTCTGAGAA
ATGTGGCTCTGGAGCCTGTCACCCTCGAGAAACCTAAGAGGGCTGCATTGATTCCATGTGGCCCTGGGTC
TATGGAGCAGTACATGAGCTCCCAGTGCTCTAAGGCTCTTCAGCCCTAGGCTTTGAAGGGAGTGATTTCT
CAGTATTCTTAAACCTCTTTCTGATGACACTTGTACCTGTGAGGGGTCTAGAGAGAAAGAGTAGTAGACT
CCTACTTTACTACAATTCAGGATGCAGGGCATGAGAGGATTCCCTCTCTCCTCCAAGGGAAGAAGCTTTT
GGCGTGCACACATCCCTGAGAAGCAAAGTGTCTTTGTCTTCAGTCAGATACATAGGACCGTTTTCTGCCC
CATGGCCCGGAAGCCAAAGGCCTTGGCTTTCATGATCAACGGTCTAGGGAAACATGCAAAATTTCCATGT
CTGTCCCAAACTCTGCCCCCGACAGCCAATTACCACCTGCAGCCCGCATTGCCAAATGCGGTGCCGTTTG
CATGAAGATTCAGTAGAGTTTCCTAGAAAGGTGCTACCTCGTGAGCTCACTTTCCAATGAGGAATCTGAT
CTGTTGTGTTTCTCTAAGGTGTCAGGTGAAATATTTCCAAGAACTTACTACAGTTCTAGAATGGGAGGAA
TCTGTTGCTTTGGTGTTTGTTTGTTGGTCGGTTTTCTCACATCCATCTGCCTATGGATAAGGAAAAGAGA
ACGGTCGTAATTCTCATAGACTCCTTTCTGGTTGTGTCACAAATGGCTTCACATGTTTCTCTATGCTCAG
AGATACTCAGCTTGATTTCCCGTGTTTTCATTTCAGCACCGACTGAGCAAAGGCCTGGGGTGCAGGAGTG
CTACCATGGTAATGGACAGAGTTATCGAGGCACATACTCCACCACTGTCACAGGAAGAACCTGCCAAGCT
TGGTCATCTATGACACCACACTCGCATAGTCGGACCCCAGAATACTACCCAAATGCGTATGTCTTTGTTC
TTTACCATAAGAGAAGAAAGGGCCAAGTGAAGTTTCTGTTACAAGAGATGTGTCTCAAGCTGAGTTCTCC
GAACTCAACTTGTGACAGATGCAGATGGCGTAGCAAAATGTCTCAGGATGATTGCCTTGGAGCTAAGGGT
CTGAGAGAAGGGAAATGTTAAGCTCCCTCTCCTTCCTCCTAGTTCTATTGAGCAGAAGGGAAATCTGGAG
GTGAGGAGATCACATTATGAAGAAAGTCAGAATGACAAAGGACCAGACACTTAGATTACCCTTCCACAAC
ACCAACTAAACGTCAATGGAGACTTTCCAGTTGGAATTCCGTTATTCTGGCTTCCACTTCCTGAAGGGAA
GGTTGCGTTTGCCTTTTCTCTCTGGGTTCAAGAGGAAAGAATAGGTGCTTATTTATGGACAGGTGAATTG
ATCTGTTTCTATATCTACGTATATTCCGATTGTCAGAAAAACACTCGTTCCTAAGTACCAGTGGCCTGAA
GGGATACAGGTTCCCAGCAAGAGAAGATCCAAGGAAGGAAGGCAGATGAGAGTCAGCACAGAGAGGGATG
CTGAAAAGTAAAAGGGATGGGTGGATGGAGAGAAGCCCGGGTCTGACCACCCAATGGCCAATATTTTGGC
CACAAGCGACTACCAGAGACATGGAAAAATGGTTTCTACATGTGGGACAACAGATGGTAGAGGACCTAGA
GAATTGAGAGAGGGGCAATGATGGGCTCCACTCCGCAGATGCCTTGGCTTTCTTCCTGGATACCCTTCCT
GCACTGAATAGCAAGGAGATGGAGCCCAAGCAGACTGTAGCCATCTTGCTGAATGGAGGAGAGGGATTGG
AGTTTGGGATGACTGTGGTAGCTGAAATTTTTCTAGGTCTGCTAGAAATAAGAACTGGTTTGTGGAGGAA
AAGAGCTCTACAAATACGCATAGAAGTCTCCTCCAGTCGTTGGCCTGACATGACGCTGCCTGTGCACAGG
AAATGGTTCCACGAGAAAGTGTGGCAAAGAACATTTACTGAGAAACAGCAAGTACAAGAGCACAGGAAGC
TCAATAAAGAAGAGAGAGATCACATAGCACTCTGGGATACTGGAGTTCTTCCCAGCTAGACCAGAGAGTC
CTCACGGAGCACATTGCCAATTCAGTGGAGACCCCAGAACAGCCGTAATTTAAAGGTACACTTAGTATAT
TACTAGAATAAAGTCAGCTGCAGACAACCCCTTGCACAGCTGGAAAGCAAGTGTCCAAGCATCAAATCGG
TTTCCAATCAATGAAGTGCCTGTGAGAGGAAATCTCAACTCTCTTTAGAAGTAAACAACAAAGTCGATTG
CCTCAGCTATGCGGTATCCGCAGAGTGAGTCCTAAATTTAAAATCTGACTACATGTAGAAAAGCGTTTCG
TGTGACCCATGACCAGGAAATAAATCGGGTAATACAAACAGGCTCAGGAATGAGAGAAATGATTAGAATT
GCGTGAAAATTTGACATATCAGTATGATAACTGATTTCAAATATTTAAAAAAACAACATGCAAGAAAGCA
GATATCATATCAAGAGAAATTAACAGTACAGAATAGCCAAATTAAATTAAAGAGCTAGTATAAAAAAAGT
ATGTCTTAATTGAAAAAAATTACTGTATGGCCGGCTGATCAATTTAGACGTTTCAGAGGAAAACATTACC
CAACACACAATTCTAGAGAACCTACAGAATGAGCTACACACACACACACACACACACACACAAACTGAAA
ACACACCCATACTCACACACACGCAGAAACTCACAAGTTCTAACACACACAGACACGCGCACCCCTGAAG
AAACAGTGAAATATAAAATTAAGCGAGCCTCACAGACATGTAGGAAAATATGAAAAGATTTCCTGCATGT
GGGAAGCAAGTCACAGTAAAGAGCAAGGGAGTTTGGAATAGAAACAAATACCGGAATCAAGGATGGCTGA
TAACTTTTCAATTACGAAGAACATTAAAAAAAATCACAGAATCGTGAAACTCAAGGGATCACATAGGGAA
TTTCGGAAAAAAAACCCAACCTGTATGATGTACTTTTGTACATCACAGTTCGAAGGTAACAAGGCAAAGA
TATAATAAGAAGAAACCTGTCACGAGAAACTGGAGGAAAAAGAGCTGTGTCTTCCTACAAGTACACTGAT
ACAAATTGCCAATGTGTTCACCTCAGAAACACTGGAAGCCAGATACCAGGGAATATTGTTAAAATGATAA
TCAGGAACAAAAAGAGATCAACCGGGAATGCTGAATCCAGCAATAAAATGCCTTGAAGATCATCCATGTC
GGATAAATGCATATTGTGCACTGCCCCAAAGAAAGAAACCGGAAACTGTAAGAATTGGAAATCAGCAGGC
TTATGTAACAAGAGAGGTGACCCGAAGGAATTAGGTAGAAGAAGAATTGAACAAGAAAGGAACTTTCTGC
AGCCCACGTAATGAAGAATCCAGCAATTGGCAAATGTAGATAGATGTAAATGCAAAATATTTTCTTGATC
AAATTTCTATATCTTTGTAAATGAGAGTTGACTACTTGAAACAAAATGATAGCAAGATATTTAACTTCAG
CATATGTAGAGGTAAGAATTTGAAATGGTAGCATAAATCACGAAGGGATTAATTCGAAGTGTACCGTTGT
AAGTTTCTTTACCTCATGCACGATGGTGTGTCATATTAATAAAAGGGTACTGTGCGGGTTCGAAGGGATA
TTGCAAATCCTAGAGCAATCACAAAGGTTTGAACTCTGAGGTTTTTGGTATAATAAGAATAGTCCATGCA
TTCAAAAGAGGGAAGCCAAGGAAGAACTAGAAGTCTTTCAAGAGCTCAGGCTCTTATACATCCAGTTGCT
CATTGAACCAGCTTCCTGGAATGGAGGGTCTGGGGTTGAGACTAGGCCACAAGTCTAGAGTCTCTAGAGA
GACAGTGTTGGAACCCCATGGCCCATAATACATTTCCCATTTTCTCAGGCAGCCAGAGGTCATGAATGTG
AGGATACTGGGAGGTTGGAGCAACGTTCTTGGGAGGCATAAGGAAGAGCGAATGCTTCAAGATCCCCGCA
GCCCAAACTACTCGCCTGCTTTGCCCCCTAATGCATTTTTCTCTGCTGCTCCGTAGCTGTCCGACCTCTT
CAGATCTCTTAGTCCACCCTGCCGTCTTCCTTTATGCCATGGGTCCCACTGTTCTTTCAACTCATCCCCC
TTTCCCTCAGTCCCGGAGTAGCTGCGGCCAGCAGAGGGTAGACTGAGAGCAGGAGAGAAGGACCTGCCTA
GGAACCCCTTCTAGAGATACTGCATCCTGCCTGGGAGCAAGTTTTCCAGGGCAGCTTTGAGAAGTCTTGG
AGAAACAAACCTACTAAACCTGACAGACAGTAATACTATTTGCACAATGCTTTTCTGTGGGAAAGGTAGA
GCCTTTTCACTACGTATTGAGTACATAGAGTGTGAGGGTTGACCTGGAACGGCTATCCTCCTGGATGACG
TGTGTTTTCTGAAGAACTACATGTTCGTTGCAACTCCCACATTAGAATATGAAGTCCTACCGAGAGAGAT
ACGGAGACTAGACAGATACAGATGCATTTGCATGTGAATACACAATCCCACAATACAGACGTCAAAACCC
ATACCAGTTATTCCAGAGAGATGGATTGGGTAGGAGGCAGAAGGAGAATACTCTGATCGTTTTTCGGCCA
CGTGTGTGTGTTATCTCAGTGTTTCTAAGAAGCGTTTGCTACTTTAGATTTTTTATTTAAAAAAAATAGT
AATAATCTATTAAGTATGAGAGATGTGCAGAGAGGATTAGTGATCGAGAGCCATTTTTGCTGGTGGCAAT
CATATGGTACTTTTAATGGGAATATTAGAAAGGCACCGGTAATGACCTTGTTGCAGCACAAAGGAGAGAG
TGTGGGGTGCCCCTGCATGTTGTCCCACCTCTTGTGACGTGTATCGTTTTGGAATTTCCAGTGGCTTGAT
CATGAACTACTGCAGGAATCCAGATGCTGTGGCAGCTCCTTATTGTTATACGAGGGATCCCGGTGTCAGG
TGGGAGTACTGCAACCTGACGCAATGCTCAGACGCAGAAGGGACTGCCGTCGCGCCTCCGACTGTTACCC
CGGTTCCAAGCCTAGAGGCTCCTTCCGAACAAGGTAAGGAGTCTGTGGCCAGACATCTACACGCTTCGAT
GCTGGGATGAAAAGCCATGGAAATTCCCACTGATGCAGCCGCCTTCAATGGTAAACGGATGCTCGAGTGT
TGCCGGAGTTCTGCCATGTTGGGGGAAGCCTCCGTGTACTCTCTGGGGGAGCCAGCGGAGTGATTTCTGG
TGCAACTTGGGTGGGCTTTGTCTTTAGAATGGGCACAAACCTTCCAGGGTGATGGGCTTCACAACTCACC
TCCTTCTAAAATGGGCTATCTCAGTGTCTTAGCCAAAATTTTTATTGTAACGTGCTGTCAGGTGTGTGAT
TCTTTCTGTCGCAGTAAGCTTTTCTGGGGATTTCTTCAAGTAGCCAGCAGTCAGTGCAATCTTCAGCATT
GCAGATTTCAAAAAATGTGGCTCTGGAGCCTGTCATCCTCGAGAAACCTAACAGGGCTGCATTAATTCCA
TATGGTCCTGGGTCTATGGAGCAGTATATGAGCTCCCAATGCTCTAAGGCTCTTCAGTCCTAGGCTTTGA
AGGGAGTGATTTCTCAGTGTTCTTAAACCTCTTTCTGATGGCACTTGTACCTGTGAGGGGTCTAGAGAGA
AAGGTTAGTAGACTTCTCCTTTACTGCAATTCAGGATGCAGGGCATGAGAAGATTCCCTCCCTCCTCCAA
GGGAAGAAGGTTTTGGCGTGCACACATCCTTGAGAAGCAAAGTGTCTTTGCCTTCAGTCAGATATATAGG
ATCGTTTTCTGCCCCATGGCCTGGAAGCCAGAGGCCTTGGCTTTCATGATCAACGATCTAGGGAAACATG
CAAAATTTCCATGTCTTTCCCCTCCTCTGCCCTCGACAGCCAATTACCACCTGCATCCTGCATTGCCAAA
TGCAGTGCCCTTTGTATGAACATTCAGTAGAGTTTCATAGAAAGGTGCTACTTCGTGAGCGCACTTTGCA
GTGAGAAGGAGTCTGTTCTGTTCTGTTTTTCTAAGGATTTCAGGTGAAATATTTCCTAGAACTTACTACA
GTTCTAGATTGGTAGGAATCTGTAGGTTTGCTGTATGTTTTTTGGTTGGTTTTCTCCCATCCATCTGCCT
ACAGGTAAGGGAAAGATAACGTTCGTAATTCTCATAGACTCCTTTCTGGTTGTGTCATAAATGGCTTCAC
ATATTTCGTTATTCTCAGAGATACTCAGTTTATTTCTTGTGTTTTCATTTCAGCACCGACTGAGCAGAGG
CCTGGGGTGCAGGAGTGCTACCACGGTAATGGACAGAGTTATCGAGGCACATACTCCACCACTGTCACTG
GAAGAACCTGCCAAGCTTGGTCATCTATGACACCACACTCGCATAGTCGGACCCCAGAATACTACCCAAA
TGCGTATGTCTTTGTTCTTTACCATAAGAGAAGAAAGGGCCAAGTGAAGTTTCTGTTACAAGAGATGTGT
CTCAAGCTGAGTTCTCCGAACTCAACTTGTGACAGATGCAGATGGCGTAGCAAAATGTCTCAGGATGATT
GCCTTGGAGCTAAGGGTCTGAGAGAAGGGAAATGTTAAGCTCCCTCTCCTTCCTCCTAGTTCTATTGAGC
AGAAGGGAAATCTGGAGGTGAGGAGATCACATTATGAAGAAAGTCAGAATGACAAAGGACCAGACACTTA
GATTACCCTTCCACAACACCAACTAAACGTCAATGGAGACTTTCCAGTTGGAATTCCGTTATTCTGGCTT
CCACTTCCTGAAGGGAAGGTTGCGTTTGCCTTTTCTCTCTGGGTTCAAGAGGAAAGAATAGGTGCTTATT
TATGGACAGGTGAATTGATCTGTTTCTATATCTACGTATATTCCGATTGTCAGAAAAACACTCGTTCCTA
AGTACCAGTGGCCTGAAGGGATACAGGTTCCCAGCAAGAGAAGATCCAAGGAAGGAAGGCAGATGAGAGC
CAGCACAGAGAGGGATGCTGAAAAGTAAAAGGGATGGGTGGATGGAGAGAAGCCCGGGTCTGACCACCCA
ATGGCCAATATTTTGGCCACAAGCGACTACCAGAGACATGGAAAAATGGTTTCTACATGTGGGACAACAG
ATGGTAGAGGACCTAGAGAATTGAGAGAGGGGCAATGATGGGCTCCACTCCGCAGATGCCTTGGCTTTCT
TCCTGGATACCCTTCCTGCACTGAATAGCAAGGAGATGGAGCCCAAGCAGACTGTAGCCATCTTGCTGAA
TGGAGGAGAGGGATTGGAGTTTGGGATGACTGTGGTAGCTGAAATTTTTCTAGGTCTGCTAGAAATAAGA
ACTGGTTTGTGGAGGAAAAGAGCTCTACAAATACGCATAGAAGTCTCCTCCAGTCGTTGGCCTGACATGA
CGCTGCCTGTGCACAGGAAATGGTTCCACGAGAAAGTGTGGCAAAGAACATTTACTGAGAAACAGCAAGT
ACAAGAGCACAGGAAGCTCAATAAAGAAGAGAGAGATCACATAGCACTCTGGGATACTGGAGTTCTTCCC
AGCTAGACCAGAGAGTCCTCACGGAGCACATTGCCAATTCAGTGGAGACCCCAGAACAGCCGTAATTTAA
AGGTACACTTAGTATATTACTAGAATAAAGTCAGCTGCAGACAACCCCTTGCACAGCTGGAAAGCAAGTG
TCCAAGCATCAAATCGGTTTCCAATCAATGAAGTGCCTGTGGGAGGAAATCTCAACTCTCTTTAGAAGTA
AACAACAAAGTCGATTGCCTCAGCTATGCGGTATCCGCAGAGTGAGTCCTAAATTTAAAATCTGACTACA
TGTAGAAAAGCGTTTCGTGTGACCCATGACCAGGAAATAAATCGGGTAATACAAACAGGCTCAGGAATGA
GAGAAATGATTAGAATTGCGTGAAAATTTGACATATCAGTATGATAACTGATTTCAAATATTTAAAAAAA
CAACATGCAAGAAAGCAGATATCATATCAAGAGAAATTAACAGTACAGAATAGCCAAATTAAATTAAAGA
GCTAGTATAAAAAAAGTATGTCTTAATTGAAAAAAATTACTGTATGGCCGGCTGATCAAATTAGACGTTT
CAGAGGAAAACATTACCCAACACACAATTCTAGAGAACCTACAGAATGAGCTACACACACACACACACAC
ACACACACACACACTGAAAACACACCCATACTCACACACACGCAGAAACTCACAAGTTCTAACACACACA
GACACGCGCACCCCTGAAGAAACAGTGAAATATAAAATTAAGCGAGCCTCACAGACATGTAGGAAAATAT
GAAAAGATTTCCTGCATGTGGGAAGCAAGTCACAGTAAAGAGCAAGGGAGTTTGGAATAGAAACAAATAC
CGGAATCAAGGATGGCTGATAACTTTTCAATTACGAAGAACATTAAAAAAAATCACAGAATCGTGAAACT
CAAGGGATCATATAGGGAATTTCGGAAAAAAAACCCAACCTGTATGATGTACTTTTGTACATCACAGTTC
GAAGGTAACAAGGCAAAGATATAATAAGAAGAAACCTGTCACGAGAAACTGGAGGAAAAAGAGCTGTGTC
TTCCTACAAGTACACTGATACAAATTGCCAATGTGTTCACCTCAGAAACACTGGAAGCCAGATACCAGGG
AATATTGTTAAAATGATAATCAGGAACAAAAAGAGATCAACCGGGAATGCTGAATCCAGCAATAAAATGC
CTTGAAGATCATCCATGTCGGATAAATGCATATTGTGCACTGCCCCAAAGAAAGAAACCGGAAACTGTCA
GAATTGGAAATCAGCAGGCTTATGTAACAAGAGAGGTGACCCGAAGGAATTAGGTAGAAGAAGAATTGAA
CAAGAAAGGAACTTTCTGCAGCCCACGTAATGAAGAATCCAGCAATTGGCAAATGTAGATAGATGTAAAT
GCAAAATATTTTCTTGATCAAATTTCTATATCTTTGTAAATGAGAGTTGACTACTTGAAACAAAATGATA
GCAAGATATTTAACTTCAGCATATGTAGAGGTAAGAATTTGAAATGGTAGCATAAATCACGAAGGGATTA
ATTCGAAGTGTACCGTTGTAAGTTTCTTTACCTCATGCACGATGGTGTGTCATATTAATAAAAGGGTACT
GTGCGGGTTCGAAGGGATATTGCAAATCCTAGAGCAATCACAAAGGTTTGAACTCTGAGGTTTTTGGTAT
AATAAGAATAGTCCATGCATTCAAAAGAGGGAAGCCAAGGAAGAACTAGAAGTCTTTCAAGAGCTCAGGC
TCTTATACATCCAGTTGCTCATTGAACCAGCTTCCTGGAATGGAGGGTCTGGGGTTGAGACTAGGCCACA
AGTCTAGAGTCTCTAGAGAGACAGTGTTGGAACCCCATGGCCCATAATACATTTCCCATTTTCTCAGGCA
GCCAGAGGTCATGAATGTGAGGATACTGGGAGGTTGGAGCAACGTTCTTGGGAGGCATAAGGAAGAGCGA
ATGCTTCAAGATCCCCGCAGCCCAAACTACTCGCCTGCTTTGCCCCCTAATGCATTTTTCTCTGCTGCTC
CGTAGCTGTCCGACCTCTTCAGATCTCTTAGTCCACCCTGCCGTCTTCCTTTATGCCATGGGTCCCATTG
TTCTTTCAACTCATCCCCCTTTCCCTCAGTCCCGGAGTAGCTGCGGCCAGCAGAGGGTAGACTGAGAGCA
GGAGAGAAGGACCTGCCTAGGAACCCCTTCTAGAGATACTGCATCCTGCCTGGGAGCAAGTTTTCCAGGG
CAGCTTTGAGAAGTCTTGGAGAAACAAACCTACTAAACCTGACAGACAGTAATACTATTTGCACAATGCT
TTTCTGTGGGAAAGGTAGAGCCTTTTCACTACGTATTGAGTACATAGAGTGTGAGGGTTGACCTGGAACG
GCTATCCTCCTGGATGACGTGCGTTTTCTGAAGAACTACATGTTCGTTGCAACTCCCACATTAGAATATG
AAGTCCTACCGAGAGAGATACGGAGACTAGACAGATACAGATGCATTTGCATGTGAATACACAATCCCAC
AATACAGACGTCAAAACCCATACCAGTTATTCCAGAGAGATGGATTGGGCAGAAGGCAGAAGGAGAATAC
TCTGATCGTTTTTCGGCCACGTGTGTGTGTTATCTCAGTGTTTCTAAGAAGCGTTTGCTACTTTAGATTT
TTTATTTAAAAAAAATAGTAATAATCTATTAAGTATGAGAGATGTGCAGAGAGGATTAGTGATCGAGAGC
CATTTTTGCTGGTGGCAATCATATGGTACTTTTAATGGGAATATTAGAAAGGCACCGGTAATGACCTTGT
TGCAGCACAAAGGAGAGAGTGTGGGGTGCCCCTGCATGTTGTCCCACCTCTTGTGACGTGTATCGTTTTG
GAATTTCCAGTGGCTTGATCATGAACTACTGCAGGAATCCAGATGCTGTGGCAGCTCCTTATTGTTATAC
GAGGGATCCCGGTGTCAGGTGGGAGTACTGCAACCTGACGCAATGCTCAGACGCAGAAGGGACTGCCGTC
GCGCCTCCGACTGTTACCCCGGTTCCAAGCCTAGAGGCTCCTTCCGAACAAGGTAAGGAGTCTGTGGCCA
GACATCTACACGCTTCGATGCTGGGATGAAAAGCCATGGAAATTCCCACTGATGCAGCCGCCTTCAATGG
TAAACGGATGCTCGAGTGTTGCCTGAGTTCTACCATGTAGGAGGAAGCCTCCGTGCACTCTCTGGGGGAG
CCAGCGGAGTGATTTCTGGTGCAACGTGGTTGGGCTTTGTCTTTAGGATGGGCACAAACCCTCCAGGGGG
ATCGACTTCAAAATTCACCTTGTTGTAAAACGGGCTACCTCAGTGTCCCAGCCAAAATTTTTATTGTAAC
ATGCTGTCAGGTGTGTCACTCTTTCCAAGCCAGTAAGCTTTTCCGGGGATTTCTTCAAGTAGCCAGCATT
CAGAGCAATCTTCAGCATTGCAGATTCTGAGAAATGTGGCTCTGGAGCCTGTCACCCTCGAGAAACCTAA
GAGGGCTGCATTGATTCCATGTGGCCCTGGGTCTATGGAGCAGTACATGAGCTCCCAGTGCTCTAAGGCT
CTTCAGCCCTAGGCTTTGAAGGGAGTGATTTCTCAGTATTCTTAAACCTCTTTCTGATGACACTTGTACC
TGTGAGGGGTCTAGAGAGAAAGAGTAGTAGACTCCTACTTTACTACAATTCAGGATGCAGGGCATGAGAG
GATTCCCTCTCTCCTCCAAGGGAAGAAGCTTTTGGCGTGCACACATCCCTGAGAAGCAAAGTGTCTTTGT
CTTCAGTCAGATACATAGGACCGTTTTCTGCCCCATGGCCCGGAAGCCAAAGGCCTTGGCTTTCATGATC
AACGGTCTAGGGAAACATGCAAAATTTCCATGTCTGTCCCAAACTCTGCCCCCGACAGCCAATTACCACC
TGCAGCCCGCATTGCCAAATGCGGTGCCGTTTGCATGAAGATTCAGTAGAGTTTCCTAGAAAGGTGCTAC
CTCGTGAGCTCACTTTCCAATGAGGAATCTGATCTGTTGTGTTTCTCTAAGGTGTCAGGTGAAATATTTC
CAAGAACTTACTACAGTTCTAGAATGGGAGGAATCTGTTGCTTTGGTGTTTGTTTGTTGGTCGGTTTTCT
CACATCCATCTGCCTATGGATAAGGAAAAGAGAACGGTCGTAATTCTCATAGACTCCTTTCTGGTTGTGT
CACAAATGGCTTCACATGTTTCTCTATGCTCAGAGATACTCAGCTTGATTTCCCGTGTTTTCATTTCAGC
ACCGACTGAGCAAAGGCCTGGGGTGCAGGAGTGCTACCATGGTAATGGACAGAGTTATCGAGGCACATAC
TCCACCACTGTCACAGGAAGAACCTGCCAAGCTTGGTCATCTATGACACCACACTCGCATAGTCGGACCC
CAGAATACTACCCAAATGCGTATGTCTTTGTTCTTTACCATAAGAGAAGAAAGGGCCAAGTGAAGTTTCT
GTTACAAGAGATGTGTCTCAAGCTGAGTTCTCCGAACTCAACTTGTGACAGATGCAGATGGCGTAGCAAA
ATGTCTCAGGATGATTGCCTTGGAGCTAAGGGTCTGAGAGAAGGGAAATGTTAAGCTCCCTCTCCTTCCT
CCTAGTTCTATTGAGCAGAAGGGAAATCTGGAGGTGAGGAGATCACATTATGAAGAAAGTCAGAATGACA
AAGGACCAGACACTTAGATTACCCTTCCACAACACCAACTAAACGTCAATGGAGACTTTCCAGTTGGAAT
TCCGTTATTCTGGCTTCCACTTCCTGAAGGGAAGGTTGCGTTTGCCTTTTCTCTCTGGGTTCAAGAGGAA
AGAATAGGTGCTTATTTATGGACAGGTGAATTGATCTGTTTCTATATCTACGTATATTCCGATTGTCAGA
AAAACACTCGTTCCTAAGTACCAGTGGCCTGAAGGGATACAGGTTCCCAGCAAGAGAAGATCCAAGGAAG
GAAGGCAGATGAGAGTCAGCACAGAGAGGGATGCTGAAAAGTAAAAGGGATGGGTGGATGGAGAGAAGCC
CGGGTCTGACCACCCAATGGCCAATATTTTGGCCACAAGCGACTACCAGAGACATGGAAAAATGGTTTCT
ACATGTGGGACAACAGATGGTAGAGGACCTAGAGAATTGAGAGAGGGGCAATGATGGGCTCCACTCCGCA
GATGCCTTGGCTTTCTTCCTGGATACCCTTCCTGCACTGAATAGCAAGGAGATGGAGCCCAAGCAGACTG
TAGCCATCTTGCTGAATGGAGGAGAGGGATTGGAGTTTGGGATGACTGTGGTAGCTGAAATTTTTCTAGG
TCTGCTAGAAATAAGAACTGGTTTGTGGAGGAAAAGAGCTCTACAAATACGCATAGAAGTCTCCTCCAGT
CGTTGGCCTGACATGACGCTGCCTGTGCACAGGAAATGGTTCCACGAGAAAGTGTGGCAAAGAACATTTA
CTGAGAAACAGCAAGTACAAGAGCACAGGAAGCTCAATAAAGAAGAGAGAGATCACATAGCACTCTGGGA
TACTGGAGTTCTTCCCAGCTAGACCAGAGAGTCCTCACGGAGCACATTGCCAATTCAGTGGAGACCCCAG
AACAGCCGTAATTTAAAGGTACACTTAGTATATTACTAGAATAAAGTCAGCTGCAGACAACCCCTTGCAC
AGCTGGAAAGCAAGTGTCCAAGCATCAAATCGGTTTCCAATCAATGAAGTGCCTGTGAGAGGAAATCTCA
ACTCTCTTTAGAAGTAAACAACAAAGTCGATTGCCTCAGCTATGCGGTATCCGCAGAGTGAGTCCTAAAT
TTAAAATCTGACTACATGTAGAAAAGCGTTTCGTGTGACCCATGACCAGGAAATAAATCGGGTAATACAA
ACAGGCTCAGGAATGAGAGAAATGATTAGAATTGCGTGAAAATTTGAAATATCAGTATGATAACTGATTT
CAAATATTTAAAAAAACAACATGCAAGAAAGCAGATATCATATCAAGAGAAATTAACAGTACAGAATAGC
CAAATTAAATTAAAGAGCTAGTATAAAAAAAGTATGTCTTAATTGAAAAAAATTACTGTATGGCCGGCTG
ATCAATTTAGACGTTTCAGAGGAAAACATTACCCAACACACAATTCTAGAGAACCTACAGAATGAGCTAC
ACACACACACACACACACACACACAAACTGAAAACACACCCATACTCACACACACGCAGAAACTCACAAG
TTCTAACACACACAGACACGCGCACCCCTGAAGAAACAGTGAAATATAAAATTAAGCGAGCCTCACAGAC
ATGTAGGAAAATATGAAAAGATTTCCTGCATGTGGGAAGCAAGTCACAGTAAAGAGCAAGGGAGTTTGGA
ATAGAAACAAATACCAGAATCAAGGATGGCTGATAACTTTTCAATTACGAAGAACATTAAAAAAAATCAC
AGAATCGTGAAACTCAAGGGATCACATAGGGAATTTCGGAAAAAAAACCCAACCTGTATGATGTACTTTT
GTACATCACAGTTCGAAGGTAACAAGGCAAAGATATAATAAGAAGAAACCTGTCACGAGAAACTGGAGGA
AAAAGAGCTGTGTCTTCCTACAAGTACACTGATACAAATTGCCAATGTGTTCACCTCAGAAACACTGGAA
GCCAGATACCAGGGAATATTGTTAAAATGATAATCAGGAACAAAAAGAGATCAACCGGGAATGCTGAATC
CAGCAATAAAATGCCTTGAAGATCATCCATGTCGGATAAATGCATATTGTGCACTGCCCCAAAGAAAGAA
ACCGGAAACTGTAAGAATTGGAAATCAGCAGGCTTATGTAACAAGAGAGGTGACCCGAAGGAATTAGGTA
GAAGAAGAATTGAACAAGAAAGGAACTTTCTGCAGCCCACGTAATGAAGAATCCAGCAATTGGCAAATGT
AGATAGATGTAAATGCAAAATATTTTCTTGATCAAATTTCTATATCTTTGTAAATGAGAGTTGACTACTT
GAAACAAAATGATAGCAAGATATTTAACTTCAGCATATGTAGAGGTAAGAATTTGAAATGGTAGCATAAA
TCACGAAGGGATTAATTCGAAGTGTACCGTTGTAAGTTTCTTTACCTCATGCACGATGGTGTGTCATATT
AATAAAAGGGTACTGTGCGGGTTCGAAGGGATATTGCAAATCCTAGAGCAATCACAAAGGTTTGAACTCT
GAGGTTTTTGGTATAATAAGAATAGTCCATGCATTCAAAAGAGGGAAGCCAAGGAAGAACTAGAAGTCTT
TCAAGAGCTCAGGCTCTTATACATCCAGTTGCTCATTGAACCAGCTTCCTGGAATGGAGGGTCTGGGGTT
GAGACTAGGCCACAAGTCTAGAGTCTCTAGAGAGACAGTGTTGGAACCCCATGGCCCATAATACATTTCC
CATTTTCTCAGGCAGCCAGAGGTCATGAATGTGAGGATACTGGGAGGTTGGAGCAACGTTCTTGGGAGGC
ATAAGGAAGAGCGAATGCTTCAAGATCCCCGCAGCCCAAACTACTCGCCTGCTTTGCCCCCTAATGCATT
TTTCTCTGCTGCTCCGTAGCTGTCCGACCTCTTCAGATCTCTTAGTCCACCCTGCCGTCTTCCTTTATGC
CATGGGTCCCACTGTTCTTTCAACTCATCCCCCTTTCCCTCAGTCCCGGAGTAGCTGCGGCCAGCAGAGG
GTAGACTGAGAGCAGGAGAGAAGGACCTGCCTAGGAACCCCTTCTAGAGATACTGCATCCTGCCTGGGAG
CAAGTTTTCCAGGGCAGCTTTGAGAAGTCTTGGAGAAACAAACCTACTAAACCTGACAGACAGTAATACT
ATTTGCACAATGCTTTTCTGTGGGAAAGGTAGAGCCTTTTCACTACGTATTGAGTACATAGAGTGTGAGG
GTTGACCTGGAACGGCTATCCTCCTGGATGACGTGTGTTTTCTGAAGAACTACATGTTCGTTGCAACTCC
CACATTAGAATATGAAGTCCTACCGAGAGAGATACGGAGACTAGACAGATACAGATGCATTTGCATGTGA
ATACACAATCCCACAATACAGACGTCAAAACCCATACCAGTTATTCCAGAGAGATGGATTGGGCAGAAGG
CAGAAGGAGAATACTCTGATCGTTTTTCGGCCACGTGTGTGTGTTATCTCAGTGTTTCTAAGAAGCGTTT
GCTACTTTAGATTTTTTATTTAAAAAAAATAGTAATAATCTATTAAGTATGAGAGATGTGCAGAGAGGAT
TAGTGATCGAGAGCCATTTTTGCTGGTGGCAATCATATGGTACTTTTAATGGGAATATTAGAAAGGCACC
GGTAATGACCTTGTTGCAGCACAAAGGAGAGAGTGTGGGGTGCCCCTGCATGTTGTCCCACCTCTTGTGA
CGTGTATCGTTTTGGAATTTCCAGTGGCTTGATCATGAACTACTGCAGGAATCCAGATGCTGTGGCAGCT
CCTTATTGTTATACGAGGGATCCCGGTGTCAGGTGGGAGTACTGCAACCTGACGCAATGCTCAGACGCAG
AAGGGACTGCCGTCGCGCCTCCGACTGTTACCCCGGTTCCAAGCCTAGAGGCTCCTTCCGAACAAGGTAA
GGAGTCTGTGGCCAGACATCTACACGCTTCGATGCTGGGATGAAAAGCCATGGAAATTCCCACTGATGCA
GCCGCCTTCAATGGTAAACGGATGCTCGAGTGTTGCCTGAGTTCTACCATGTAGGAGGAAGCCTCCGTGC
ACTCTCTGGGGGAGCCAGCGGAGTGATTTCTGGTGCAACGTGGTTGGGCTTTGTCTTTAGGATGGGCACA
AACCCTCCAGGGGGATCGACTTCAAAATTCACCTTGTTGTAAAACGGGCTACCTCAGTGTCCCAGCCAAA
ATTTTTATTGTAACATGCTGTCAGGTGTGTCACTCTTTCCAAGCCAGTAAGCTTTTCCGGGGATTTCTTC
AAGTAGCCAGCATTCAGAGCAATCTTCAGCATTGCAGATTCTGAGAAATGTGGCTCTGGAGCCTGTCACC
CTCGAGAAACCTAAGAGGGCTGCATTGATTCCATGTGGCCCTGGGTCTATGGAGCAGTACATGAGCTCCC
AGTGCTCTAAGGCTCTTCAGCCCTAGGCTTTGAAGGGAGTGATTTCTCAGTATTCTTAAACCTCTTTCTG
ATGACACTTGTACCTGTGAGGGGTCTAGAGAGAAAGAGTAGTAGACTCCTACTTTACTACAATTCAGGAT
GCAGGGCATGAGAGGATTCCCTCTCTCCTCCAAGGGAAGAAGCTTTTGGCGTGCACACATCCCTGAGAAG
CAAAGTGTCTTTGTCTTCAGTCAGATACATAGGACCGTTTTCTGCCCCATGGCCCGGAAGCCAAAGGCCT
TGGCTTTCATGATCAACGGTCTAGGGAAACATGCAAAATTTCCATGTCTGTCCCAAACTCTTCCCCCGAC
AGCCAATTACCACCTGCAGCCCGCATTGCCAAATGCGGTGCCGTTTGCATGAAGATTCAGTAGAGTTTCC
TAGAAAGGTGCTACCTCGTGAGCTCACTTTCCAATGAGGAATCTGATCTGTTGTGTTTCTCTAAGGTGTC
AGGTGAAATATTTCCAAGAACTTACTACAGTTCTAGAATGGGAGGAATCTGTTGCTTTGGTGTTTGTTTG
TTGGTCGGTTTTCTCACATCCATCTGCCTATGGATAAGGAAAAGAGAACGGTCGTAATTCTCATAGACTC
CTTTCTGGTTGTGTCACAAATGGCTTCACATGTTTCTCTATGCTCAGAGATACTCAGCTTGATTTCCCGT
GTTTTCATTTCAGCACCGACTGAGCAAAGGCCTGGGGTGCAGGAGTGCTACCATGGTAATGGACAGAGTT
ATCGAGGCACATACTCCACCACTGTCACAGGAAGAACCTGCCAAGCTTGGTCATCTATGACACCACACTC
GCATAGTCGGACCCCAGAATACTACCCAAATGCGTATGTCTTTGTTCTTTACCATAAGAGAAGAAAGGGC
CAAGTGAAGTTTCTGTTACAAGAGATGTGTCTCAAGCTGAGTTCTCCGAACTCAACTTGTGACAGATGCA
GATGGCGTAGCAAAATGTCTCAGGATGATTGCCTTGGAGCTAAGGGTCTGAGAGAAGGGAAATGTTAAGC
TCCCTCTCCTTCCTCCTAGTTCTATTGAGCAGAAGGGAAATCTGGAGGTGAGAAGATCACATTATGAAGA
AAGTCAGAATGACAAAGGACCAGACACTTAGATTACCCTTCCACAACACCAACTAAACGTCAATGGAGAC
TTTCCAGTTGGAATTCCGTTATTCTGGCTTCCACTTCCTGAAGGGAAGGTTGCGTTTGCCTTTTCTCTCT
GGGTTCAAGAGGAAAGAATAGGTGCTTATTTATGGACAGGTGAATTGATCTGTTTCTATATCTACGTATA
TTCCGATTGTCAGAAAAACACTCGTTCCTAAGTACCAGTGGCCTGAAGGGATACAGGTTCCCAGCAAGAG
AAGATCCAAGGAAGGAAGGCAGATGAGAGTCAGCACAGAGAGGGATGCTGAAAAGTAAAAGGGATGGGTG
GATGGAGAGAAGCCCGGGTCTGACCACCCAATGGCCAATATTTTGGCCACAAGCGACTACCAGAGACATG
GAAAAATGGTTTCTACATGTGGGACAACAGATGGTAGAGGACCTAGAGAATTGAGAGAGGGGCAATGATG
GGCTCCACTCCGCAGATGCCTTGGCTTTCTTCCTGGATACCCTTCCTGCACTGAATAGCAAGGAGATGGA
GCCCAAGCAGACTGTAGCCATCTTGCTGAATGGAGGAGAGGGATTGGAGTTTGGGATGACTGTGGTAGCT
GAAATTTTTCTAGGTCTGCTAGAAATAAGAACTGGTTTGTGTGGAGGAAAAGAGCTCTACAAATACGCAT
AGAAGTCTCCTCCAGTCGTTGGCCTGACATGACGCTGCCTGTGCACAGGAAATGGTTCCACGAGAAAGTG
TGGCAAAGAACATTTACTGAGAAACAGCAAGTACAAGAGCACAGGAAGCTCAATAAAGAAGAGAGAGATC
ACATAGCACTCTGGGATACTGGAGTTCTTCCCAGCTAGACCAGAGAGTCCTCACGGAGCACATTGCCAAT
TCAGTGGAGACCCCAGAACAGCCGTAATTTAAAGGTACACTTAGTATATTACTAGAATAAAGTCAGCTGC
AGACAACCCCTTGCACAGCTGGAAAGCAAGTGTCCAAGCATCAAATCGGTTTCCAATCAATGAAGTGCCT
GTGAGAGGAAATCTCAACTCTCTTTAGAAGTAAACAACAAAGTCGATTGCCTCAGCTATGCGGTATCCGC
AGAGTGAGTCCTAAATTTAAAATCTGACTACATGTAGAAAAGCGTTTCGTGTGACCCATGACCAGGAAAT
AAATCGGGTAATACAAACAGGCTCAGGAATGAGAGAAATGATTAGAATTGCGTGAAAATTTGACATATCA
GTATGATAACTGATTTCAAATATTTAAAAAAACAACATGCAAGAAAGCAGATATCATATCAAGAGAAATT
AACAGTACAGAATAGCCAAATTAAATTAAAGAGGTAGTATAAAAAAAGTATGTCTTAATTGAAAAAAATT
ACTGTATGGCCGGCTGATCAATTTAGACGTTTCAGAGGAAAACATTACCCAACACACAATTCTAGAGAAC
CTACAGAATGAGCTACACACACACACACACACACACACACAAACTGAAAACACACCCATACTCACACACA
CGCAGAAACTCACAAGTTCTAACACACACAGACACGCGCACCCCTGAAGAAACAGTGAAATATAAAATTA
AGCGAGCCTCACAGACATGTAGGAAAATATGAAAAGATTTCCTGCATGTGGGAAGCAAGTCACAGTAAAG
AGCAAGGGAGTTTGGAATAGAAACAAATACCGGAATCAAGGATGGCTGATAACTTTTCAATTACGAAGAA
CATTAAAAAAAATCACAGAATCGTGAAACTCAAGGGATCACATAGGGAATTTCGGAAAAAAAACCCAACC
TGTATGATGTACTTTTGTACATCACAGTTCGAAGGTAACAAGGCAAAGATATAATAAGAAGAAACCTGTC
ACGAGAAACTGGAGGAAAAAGAGCTGTGTCTTCCTACAAGTACACTGATACAAATTGCCAATGTGTTCAC
CTCAGAAACACTGGAAGCCAGATACCAGGGAATATTGTTAAAATGATAATCAGGAACAAAAAGAGATCAA
CCGGGAATGCTGAATCCAGCAATAAAATGCCTTGAAGGTCATCCATGTCGGATAAATGCATATTGTGCAC
TGCCCCAAAGAAAGAAACCGGAAACTGTAAGAATTGGAAATCAGCAGGCTTATGTAACAAGAGAGGTGAC
CCGAAGGAATTAGGTAGAAGAAGAATTGAACAAGAAAGGAACTTTCTGCAGCCCACGTAATGAAGAATCC
AGCAATTGGCAAATGTAGATAGATGTAAATGCAAAATATTTTCTTGATCAAATTTCTATATCTTTGTAAA
TGAGAGTTGACTACTTGAAACAAAATGATAGCAAGATATTTAACTTCAGCATATGTAGAGGTAAGAATTT
GAAATGGTAGCATAAATCACGAAGGGATTAATTCGAAGTGTACCGTTGTAAGTTTCTTTACCTCATGCAC
GATGGTGTGTCATATTAATAAAAGGGTACTGTGCGGGTTCGAAGGGATATTGCAAATCCTAGAGCAATCA
CAAAGGTTTGAACTCTGAGGTTTTTGGTATAATAAGAATAGTCCATGCATTCAAAAGAGGGAAGCCAAGG
AAGAACTAGAAGTCTTTCAAGAGCTCAGGCTCTTATACATCCAGTTGCTCATTGAACCAGCTTCCTGGAA
TGGAGGGTCTGGGGTTGAGACTAGGCCACAAGTCTAGAGTCTCTAGAGAGACAGTGTTGGAACCCCATGG
CCCATAATACATTTCCCATTTTCTCAGGCAGCCAGAGGTCATGAATGTGAGGATACTGGGAGGTTGGAGC
AACGTTCTTGGGAGGCATAAGGAAGAGCGAATGCTTCAAGATCCCCGCAGCCCAAACTACTCGCCTGCTT
TGCCCCCTAATGCATTTTTCTCTGCTGCTCCGTAGCTGTCCGACCTCTTCAGATCTCTTAGTCCACCCTG
CCGTCTTCCTTTATGCCATGGGTCCCACTGTTCTTTCAACTCATCCCCCTTTCCCTCAGTCCCGGAGTAG
CTGCGGCCAGCAGAGGGTAGACTGAGAGCAGGAGAGAAGGACCTGCCTAGGAACCCCTTCTAGAGATACT
GCATCCTGCCTGGGAGCAAGTTTTCCAGGGCAGCTTTGAGAAGTCTTGGAGAAACAAACCTACTAAACCT
GACAGACAGTAATACTATTTGCACAATGCTTTTCTGTGGGAAAGGTAGAGCCTTTTCACTACGTATTGAG
TACATAGAGTGTGAGGGTTGACCTGGAACGGCTATCCTCCTGGATGACGTGCGTTTTCTGAAGAACTACA
TGTTCGTTGCAACTCCCACATTAGAATATGAAGTCCTACCGAGAGAGATACGGAGACTAGACAGATACAG
ATGCATTTGCATGTGAATACACAATCCCACAATACAGACGTCAAAACCCATACCAGTTATTCCAGAGAGA
TGGATTGGGCAGAAGGCAGAAGGAGAATACTCTGATCGTTTTTCGGCCACGTGTGTGTGTTATCTCAGTG
TTTCTAAGAAGCGTTTGCTACTTTAGATTTTTTATTTAAAAAAAATAGTAATAATCTATTAAGTATGAGA
GATGTGCAGAGAGGATTAGTGATCGAGAGCCATTTTTGCTGGTGGCAATCATATGGTACTTTTAATGGGA
ATATTAGAAAGGCACCGGTAATGACCTTGTTGCAGCACAAAGGAGAGAGTGTGGGGTGCCCCTGCATGTT
GTCCCACCTCTTGTGACGTGTATCGTTTTGGAATTTCCAGTGGCTTGATCATGAACTACTGCAGGAATCC
AGATGCTGTGGCAGCTCCTTATTGTTATACGAGGGATCCCGGTGTCAGGTGGGAGTACTGCAACCTGACG
CAATGCTCAGACGCAGAAGGGACTGCCGTCGCGCCTCCGACTGTTACCCCGGTTCCAAGCCTAGAGGCTC
CTTCCGAACAAGGTAAGGAGTCTGTGGCCAGACATCTACACGCTTCGATGCTGGGATGAAAAGCCATGGA
AATTCCCACTGATGCAGCCGCCTTCAATGGTAAACGGATGCTCGAGTGTTGCCTGAGTTCTACCATGTAG
GAGGAAGCCTCCGTGCACTCTCTGGGGGAGCCAGCGGAGTGATTTCTGGTGCAACGTGGTTGGGCTTTGT
CTTTAGGATGGGCACAAACCCTCCAGGGGGATCGACTTCAAAATTCACCTTGTTGTAAAACGGGCTACCT
CAGTGTCCCAGCCAAAATTTTTATTGTAACATGCTGTCAGGTGTGTCACTCTTTCCAAGCCAGTAAGCTT
TTCCGGGGATTTCTTCAAGTAGCCAGCATTCAGAGCAATCTTCAGCATTGCAGATTCTGAGAAATGTGGC
TCTGGAGCCTGTCACCCTCGAGAAACCTAAGAGGGCTGCATTGATTCCATGTGGCCCTGGGTCTATGGAG
CAGTACATGAGCTCCCAGTGCTCTAAGGCTCTTCAGCCCTAGGCTTTGAAGGGAGTGATTTCTCAGTATT
CTTAAACCTCTTTCTGATGACACTTGTACCTGTGAGGGGTCTAGAGAGAAAGAGTAGTAGACTCCTACTT
TACTACAATTCAGGATGCAGGGCATGAGAGGATTCCCTCTCTCCTCCAAGGGAAGAAGCTTTTGGCGTGC
ACACATCCCTGAGAAGCAAAGTGTCTTTGTCTTCAGTCAGATACATAGGACCGTTTTCTGCCCCATGGCC
CGGAAGCCAAAGGCCTTGGCTTTCATGATCAACGGTCTAGGGAAACATGCAAAATTTCCATGTCTGTCCC
AAACTCTGCCCCCGACAGCCAATTACCACCTGCAGCCCGCATTGCCAAATGCGGTGCCGTTTGCATGAAG
ATTCAGTAGAGTTTCCTAGAAAGGTGCTACCTCGTGAGCTCACTTTCCAATGAGGAATCTGATCTGTTGT
GTTTCTCTAAGGTGTCAGGTGAAATATTTCCAAGAACTTACTACAGTTCTAGAATGGGAGGAATCTGTTG
CTTTGGTGTTTGTTTGTTGGTCGGTTTTCTCACATCCATCTGCCTATGGATAAGGAAAAGAGAACGGTCG
TAATTCTCATAGACTCCTTTCTGGTTGTGTCACAAATGGCTTCACATGTTTCTCTATGCTCAGAGATACT
CAGCTTGATTTCCCGTGTTTTCATTTCAGCACCGACTGAGCAAAGGCCTGGGGTGCAGGAGTGCTACCAT
GGTAATGGACAGAGTTATCGAGGCACATACTCCACCACTGTCACAGGAAGAACCTGCCAAGCTTGGTCAT
CTATGACACCACACTCGCATAGTCGGACCCCAGAATACTACCCAAATGCGTATGTCTTTGTTCTTTACCA
TAAGAGAAGAAAGGGCCAAGTGAAGTTTCTGTTACAAGAGATGTGTCTCAAGCTGAGTTCTCCGAACTCA
ACTTGTGACAGATGCAGATGGCGTAGCAAAATGTCTCAGGATGATTGCCTTGGAGCTAAGGGTCTGAGAG
AAGGGAAATGTTAAGCTCCCTCTCCTTCCTCCTAGTTCTATTGAGCAGAAGGGAAATCTGGAGGTGAGGA
GATCACATTATGAAGAAAGTCAGAATGACAAAGGACCAGACACTTAGATTACCCTTCCACAACACCAACT
AAACGTCAATGGAGACTTTCCAGTTGGAATTCCGTTATTCTGGCTTCCACTTCCTGAAGGGAAGGTTGCG
TTTGCCTTTTCTCTCTGGGTTCAAGAGGAAAGAATAGGTGCTTATTTATGGACAGGTGAATTGATCTGTT
TCTATATCTACGTATATTCCGATTGTCAGAAAAACACTCGTTCCTAAGTACCAGTGGCCTGAAGGGATAC
AGGTTCCCAGCAAGAGAAGATCCAAGGAAGGAAGGCAGATGAGAGTCAGCACAGAGAGGGATGCTGAAAA
GTAAAAGGGATGGGTGGATGGAGAGAAGCCCGGGTCTGACCACCCAATGGCCAATATTTTGGCCACAAGC
GACTACCAGAGACATGGAAAAATGGTTTCTACATGTGGGACAACAGATGGTAGAGGACCTAGAGAATTGA
GAGAGGGGCAATGATGGGCTCCACTCCGCAGATGCCTTGGCTTTCTTCCTGGATACCCTTCCTGCACTGA
ATAGCAAGGAGATGGAGCCCAAGCAGACTGTAGCCATCTTGCTGAATGGAGGAGAGGGATTGGAGTTTGG
GATGACTGTGGTAGCTGAAATTTTTCTAGGTCTGCTAGAAATAAGAACTGGTTTGTGTGGAGGAAAAGAG
CTCTACAAATACGCATAGAAGTCTCCTCCAGTCGTTGGCCTGACATGACGCTGCCTGTGCACAGGAAATG
GTTCCACGAGAAAGTGTGGCAAAGAACATTTACTGAGAAACAGCAAGTACAAGAGCACAGGAAGCTCAAT
AAAGAAGAGAGAGATCACATAGCACTCTGGGATACTGGAGTTCTTCCCAGCTAGACCAGAGAGTCCTCAC
GGAGCACATTGCCAATTCAGTGGAGACCCCAGAACAGCCGTAATTTAAAGGTACACTTAGAATATTACTA
GAATAAAGTCAGCTGCAGACAACCCCTTGCACAGCTGGAAAGCAAGTGTCCAAGCATCAAATCGGTTTCC
AATCAATGAAGTGCCTGTGAGAGGAAATCTCAACTCTCTTTAGAAGTAAACAACAAAGTCGATTGCCTCA
GCTATGCGGTATCCGCAGAGTGAGTCCTAAATTTAAAATCTGACTACATGTAGAAAAGCGTTTCGTGTGA
CCCATGACCAGGAAATAAATCGGGTAATACAAACAGGCTCAGGAATGAGAGAAATGATTAGAATTGCGTG
AAAATTTGACATATCAGTATGATAACTGATTTCAAATATTTAAAAAAACAACATGCAAGAAAGCAGATAT
CATATCAAGAGAAATTAACAGTACAGAATAGCCAAATTAAATTAAAGAGCTAGTATAAAAAAAGTATGTC
TTAATTGAAAAAAATTACTGTATGGCCGGCTGATCAAATTAGACGTTTCAGAGGAAAACATTACCCAACA
CACAATTTTAGAGAACCTACAGAATGAGCTACACACACACACACACACACACACACACACACAAACTGAA
AACACACCCATACTCACACACACGCAGAAACTCACAAGTTCTAACACACACAGACACGCGCACCCCTGAA
GAAACAGTGAAATATAAAATTAAGCGAGCCTCACAGACATGTAGGAAAATATGAAAAGATTTCCTGCATG
TGGGAAGCAAGTCACAGTAAAGAGCAAGGGAGTTTATAATAGAAACAAATACCAGAATCAAGGATGGCTG
ATAACTTTTCAATTACGAAGAACATTAAAAAAAATCACAGAATCGTGAAACTCAAGGGATCATATAGGGA
ATTTCGGAAAAAAAACCCAACCTGTATGATGTACTTTTGTACATCACAGTTCGAAGGTAACAAGGCAAAG
ATGTAATAAGAAGAAACCTGTCACGAGAAACTGGAGGAAAAAGAGCTGTGTCTTCCTACAAGTACACTGA
TACAAATTGCCAATGTGTTCACCTCAGAAACACTGGAAGCCAGATACCAGGGAATATTGTTAAAATGATA
ATCAGGAACAAAAAGAGATCAACCGGGAATGCTGAATCCAGCAATAAAATGCCTTGAAGGTCATCCATGT
CGGATAAATGCATATTGTGCACTGCCCCAAAGAAAGAAACCGGAAACTGTAAGAATTGGAAATCAGCAGG
CTTATGTAACAAGAGAGGTGACCCGAAGGAATTAGGTAGAAGAAGAATTGAACAAGAAAGGAACTTTCTG
CAGCCCACGTAATGAAGAATCCAGCAATTGGCAAATGTAGATAGATGTAAATGCAAAATATTTTCTTGAT
CAAATTTCTATATCTTTGTAAATGAGAGTTGACTACTTGAAACAAAATGATAGCAAGATATTTAACTTCA
GCATATGTAGAGGTAAGAATTTGAAATGGTAGCATAAATCACGAAGGGATTAATTCGAAGTGTACCGTTG
TAAGTTTCTTTACCTCATGCACGATGGTGTGTCATATTAATAAAAGGGTACTGTGCGGGTTCGAAGGGAT
ATTGCAAATCCTAGAGCAATCACAAAGGTTTGAACTCTGAGGTTTTTGGTATAATAAGAATAGTCCATGC
ATTCAAAAGAGGGAAGCCAAGGAAGAACTAGAAGTCTTTCAAGAGCTCAGGCTCTTATACATCCAGTTGC
TCATTGAACCAGCTTCCTGGAATGGAGGGTCTGGGGTTGAGACTAGGCCACAAGTCTAGAGTCTCTAGAG
AGACAGTGTTGGAACCCCATGGCCCATAATACATTTCCCATTTTCTCAGGCAGCCAGAGGTCATGAATGT
GAGGATACTGGGAGGTTGGAGCAACGTTCTTGGGAGGCATAAGGAAGAGCGAATGCTTCAAGATCCCCGC
AGCCCAAACTACTCGCCTGCTTTGCCCCCTAATGCATTTTTCTCTGCTGCTCCGTAGCTGTCCGACCTCT
TCAGATCTCTTAGTCCACCCTGCCGTCTTCCTTTATGCCATGGGTCCCACTGTTCTTTCAACTCATCCCC
CTTTCCCTCAGTCCCGGAGTAGCTGCGGCCAGCAGAGGGTAGACTGAGAGCAGGAGAGAAGGACCTGCCT
AGGAACCCCTTCTAGAGATACTGCATCCTGCCTGGGAGCAAGTTTTCCAGGGCAGCTTTGAGAAGTCTTG
GAGAAACAAACCTACTAAACCTGACAGACAGTAATACTATTTGCACAATGCTTTTCTGTGGGAAAGGTAG
AGCCTTTTCACTACGTATTGAGTACATAGAGTGTGAGGGTTGACCTGGAACGGCTATCCTCCTGGATGAC
GTGCGTTTTCTGAAGAACTACATGTTCGTTGCAACTCCCACATTAGAATATGAAGTCCTACCGAGAGAGA
TACGGAGACTAGACAGATACAGATGCATTTGCATGTGAATACACAATCCCACAATACAGACGTCAAAACC
CATACCAGTTATTCCAGAGAGATGGATTGGGCAGAAGGCAGAAGGAGAATACTCTGATCGTTTTTCGGCC
ACGTGTGTGTGTTATCTCAGTGTTTCTAAGAAGCGTTTGCTACTTTAGATTTTTTATTTAAAAAAAATAG
TAATAATCTATTAAGTATGAGAGATGTGCAGAGACGATTAGTGATCGAGAGCCATTTTTGCTGGTGGCAA
TCATATGGTACTTTTAATGGGAATATTAGAAAGGCACCGGTAATGACCTTGTTGCAGCACAAAGGAGAGA
GTGTGGGGTGCCCCTGCATGTTGTCCCACCTCTTGTGACGTGTATCGTTTTGGAATTTCCAGTGGCTTGA
TCATGAACTACTGCAGGAATCCAGATGCTGTGGCAGCTCCTTATTGTTATACGAGGGATCCCGGTGTCAG
GTGGGAGTACTGCAACCTGACGCAATGCTCAGACGCAGAAGGGACTGCCGTCGCGCCTCCGACTGTTACC
CCGGTTCCAAGCCTAGAGGCTCCTTCCGAACAAGGTAAGGAGTCTGTGGCCAGACATCTACACGCTTCGA
TGCTGGGATGAAAAGCCATGGAAATTCCCACTGATGCAGCCGCCTTCAATGGTAAACGGATGCTCGAGTG
TTGCCTGAGTTCTACCATGTAGGAGGAAGCCTCCGTGCACTCTCTGGGGGAGCCAGCGGAGTGATTTCTG
GTGCAACGTGGTTGGGCTTTGTCTTTAGGATGGGCACAAACCCTCCAGGGGGATCGACTTCAAAATTCAC
CTTGTTGTAAAACGGGCTACCTCAGTGTCCCAGCCAAAATTTTTATTGTAACATGCTGTCAGGTGTGTCA
CTCTTTCCAAGCCAGTAAGCTTTTCCGGGGATTTCTTCAAGTAGCCAGCATTCAGAGCAATCTTCAGCAT
TGCAGATTCTGAGAAATGTGGCTCTGGAGCCTGTCATCCTCGAGAAACCTAACAGGGCTGCATTAATTCC
ATATGGTCCTGGGTCTATGGAGCAGTATATGAGCTCCCAATGCTCTAAGGCTCTTCAGTCCTAGGCTTTG
AAGGGAGTGATTTCTCAGTGTTCTTAAACCTCTTTCTGATGGCACTTGTACCTGTGAGGGGTCTAGAGAG
AAAGGTTAGTAGACTTCTCCTTTACTGCAATTCAGGATGCAGGGCATGAGAAGATTCCCTCCCTCCTCCA
AGGGAAGAAGGTTTTGGCGTGCACACATCCTTGAGAAGCAAAGTGTCTTTGCCTTCAGTCAGATATATAG
GATCGTTTTCTGCCCCATGGCCTGGAAGCCAGAGGCCTTGGCTTTCATGATCAACGATCTAGGGAAACAT
GCAAAATTTCCATGTCTTTCCCCTCCTCTGCCCTCGACAGCCAATTACCACCTGCATCCTGCATTGCCAA
ATGCAGTGCCCTTTGTATGAACATTCAGTAGAGTTTCATAGAAAGGTGCTACTTCGTGAGCGCACTTTGC
AGTGAGAAGGAGTCTGTTCTGTTCTGTTTTTCTAAGGATTTCAGGTGAAATATTTCCTAGAACTTACTAC
AGTTCTAGATTGGTAGGAATCTGTAGGTTTGCTGTATGTTTTTTGGTTGGTTTTCTCCCATCCATCTGCC
TACAGGTAAGGGAAAGATAACGTTCATAATTCTCATAGACTCCTTTCTGGTTGTGTCATAAATGGCTTCA
CATATTTCGTTATTCTCAGAGATACTCAGTTTATTTCTTGTGTTTTCATTTCAGCACCGACTGAGCAGAG
GCCTGGGGTGCAGGAGTGCTACCACGGTAATGGACAGAGTTATCGAGGCACATACTCCACCACTGTCACT
GGAAGAACCTGCCAAGCTTGGTCATCTATGACACCACACTCGCATAGTCGGACCCCAGAATACTACCCAA
ATGCGTATGTCTTTGTTCTTTACCATAAGAGAATAAAGGGCCAACTGAAGTTTCTGTGACAAGAGACATG
CTTCAAGCTGAGTTCTCCGAACTCAACTTGTGTCAGATTCAGATGGTGTAGCAAAATGTCTCAGGATGAT
TTCCTTGGAGCTAAGGGTCTGAGAGAAGAGAAATGTTAAGCTGCCTCACCTTCCTCCTAGTTTTGTGGAG
CAGAAGGGAAATGAGGAGGCGAGGAGATCACCTTATGAAGAAAGTCAGAATGACGAACCACCAAACACTT
AGATTACCCTTGCCCAACACCCACTAAGCGTCAATGAAGACTTTCCAGTTGGAATTCCGTTATTCTGACT
TCCAATTCCTGAAGGGAAGATTGTGTTTGCCTTTTCTGTCTGGGCTCATGAGGAAAGTTTATGTGCTTAC
TTATGGACAGGTGAATTGATCTGTTTCTATTTCTACCTGTATTCCAATAGGGAGAAAATCTCTTGGTCCT
AAGTACCAGTGGCCTGAAAGGATAGAGGTTCCCAGCAAGAGAAGATCCAAGGAAGGAAGGCAGATGAGAG
TCAGCACAGAGAGGGATGCTGAAAAGTAAAAGGGATGGGTAGATGGATAGAAGCCCTGGTCTGACCACCC
CATGGCCAATCATTTGGCCATAATCAACAACCAAAGACATGGAAAAATGGTTTCTACATGTGGGACAACA
GATGGTAGAGGACCTAGAGAATTGAGAGAGGGCCAATGATGAGCTCAACTCCATAGATGCCTTGGCTTTC
TTCCTGGATACCCTTCCTGCACTGAATAGCAAGGAGATGGAGCTCAAGCAGCCTGTAGCCATCTAGCTGA
GCAGAGGAGAGGGATTGGAGTTTGGGATGACTCTGGTATTTTCTAGGTCCGCTACAAATAAGAACTGGTT
TGTGGAGGAAAGGAGCTCTACAAATACGCATAGAAGTCTCCTCCAGTAGTTGGCCTCACATGACACTGCA
TGTGCACAGAAAATGGTTCTACAGAAAGTGTGGCAAAGAACATTTACTGAGAAACAGCAACTACAAGAGA
ACAGCAAGCTCAATTAAGAAGATAGAGATCACATAGCACTCTGTGTTATTGGAGTTCTTACCAGCTAGAT
GAGAGAGTGCTCACGGAACACATTGCCAATTCAGTGGAGACCCCAGAACAGCCATAATTTCAAAGTACAA
TTAGTATATTACTAGAATAAAGGCAGCTGCAGACAACCCCTTGCACAGCTGAAAAGCAAGTGTCCAAGCA
TCAAATGGGTTTCCAATCAATGAAGTGCCTGTGAGAGGAAATCTCAACTCTCTTCAGAAGTAAACAACAA
AGTCAATTGCCTCAGCTATGCGGTATCCCCAGAGTGAGTCCTAAATTAAAAATTTGACTACGTGTAGAAA
AGAATTTCGTGTGATCCATGACCAGAAAATAAATCAGGCAATACAAACAGGCTCAGAAATGACATCGATA
ATTAGAATTGCATGAAAATTTGACATATCAGTATGATAACTGATTTCAGATATTTAAAAAAAGTGCAACA
AAGCAGGTATCATATCAAGACAAATTAATAGTATAGAATAGCCAAATCAAATTAAAGAACTATTATACAA
AAAGTATGTCTTAAATGAAGAAATTACTGTATGTCCGCCTGAAAAATTTAGATGTTTCAGAAGAAAAAAT
TAACCAAAAACAATTCTGCAGAACCTACAGAATGAGCCACACACACACACATTCAAAACACACCCATACA
CACACACATGCAAAAACTCACAAGTTCTAACACACACACAAACACACACACACATGCACATCCCTAAAGA
AATAGGGAAATATAAAATTAACCGACCCTCAGAGACATGCAGGAAAATATAAGAAGATTTCCTGCATGTG
GGAAGCAAGTCACAGTAAAGAGCAAGGGAGTTTGGAGTAGATACAAATACCGGAATCACGGATGGCTGAT
AACTTTTCAATTATGAAGAACGTTAGAAAAATCACAGATTCATGAAACTAAAGGGATCAAATAGGAAATT
TCGAGAAAAAAAACTACATGATGCACTTCTCTACATCACAGTTCAAAGGTAACAAGGCAAGGATATAAGA
AGAAGAAACATCTCACGAGAAACTGGAGAAAAAAGAGCTGTGTCTTCCTAGAGTACAGTGATACAAATTG
CTAATGCGTTCACCTCAGAAACACTGGAAGCCAGATACCAGGGAATATTATTAAAATGATAATGAGGAAC
AAGAAGAGATCAACCGAGAATGCTGAATCCAGCAATAAAATGCCTTGAAGATCATCCATGTTGGATAAAT
GCATATTGTGCACTGCCCAAAACAAAGAAACTGGAAAGTGTAAGACTTTGGAATCAGCAGGCTTATGTAG
CAACAGAGGTGACCCGAAAGAATTAGGTATAAGAAGAATAGAAGAATTGCATGAAAATTTGACATATGAC
TAAGATAACTATTTCAAATATTTAAAAAAAGATGAATATGTAATAAAACAGATAAAATATCAAAAGAAAG
TAACAGTATTGACTAGCCAAATCAAATTAAAGACTTAGTGTAAAAAGCTATGTCTTAAAAGAAAAAATTA
CTGGATGGCTGCCTGATCAATTTAGACATTTCTGAATAGGAAACTAACCAAAAATCAATTCTACAGAACC
AACTACACACATATATACACATACAACACACCCATACACACCCACGCAAAAACTCACAAGTTCACACACA
CACACACACACACACAACCCTCAAGAAATAGTGAAATAGAAAACCAACCGAACCTCACAGACATGTTGCA
AAATAGGAAAAGATTTCCTGCATATGGGAAGCAAGTCACAGAAAAGAGAACGGGAGATTGGAAACAGAAA
CAAATACCGGAATCAAGGATGGCCGAAAACTTTTCATTGATCAAGAATATTAACAAAATCGCAAAAACAC
GAAATTCAATGCATCAAATAGGCGTTTCGAAAAAAAGAAAAAATCTGGTATGATGCACTTTTGTACTTCA
CATTTTCACGGTAAGAAGACAAAGATATAATAACAAGAAACTTCTTATGAGAAACTGGGGAAAAACAAGC
TGTTTCTTGCTAGAAGAACAGTGATACAAATTGCTAATGCATTCTCGTCAAAAACACTGGAAGCCAGATA
CCGGGAATGTTATTAATGTGGTAAACAGGAACAAGAAGAGATCAACCAAGAATGCTAAATCCAGCAATAA
AATGCCTTGAAGATCATCCATGCTGCATAAATGTATGTTGTGCACTGCCCCAAACAAAGAAACCGGAAAC
TGTAAGAATTTGGAATCAGCAGGCTGATGTAACAAGAGAGGTGACCCAAAGGAATTAGGTAGAAGAAGAA
TAGTACAAGAAGGGAACTTTCTGCAGCCCATGTAATGAAGAACCCAGCAATTGGCAAATGTAGATGTAAA
TGCAAAATATTTTCTTGACCAAATTTCTATATATTTTTAAATGAGCGTTGACTACTGGAAACAAAATGAT
AGCAATATATTTAATTTTAGCATATGTAGAGGTAAGAATTTGAACAAGTAGCGTAAATCATGTAGGGAAT
AATTAGAAGTGTACCATTGTAAGTTTCTTACCTCATGCACAATGGTATGTAATATTAATAAAATGTTACT
GTGTGGGTTCAAGGAGATATTGCAAATCCTAGAGCAATCACAAAGTTTTGAACTCTGAGGTATATTGTAT
AATAAGAATATTCCATGTATTCAAAAGAGAGAAGCCAAGGAAGAAAGAAATTTGTCACGAGTTTGGGCTC
TTAGTACATCCTGTAGCTCATTGAACCAGCTTCCTGGAATGGAGGGTCTGGGATTGACACTAGGCCACAT
GTATAGAGTCTCTAGAGAGACAGTGTTTCATCCCCATGGCCCGTAATACATTTCCCATTTTCTCAGGCAG
CCACAGGTCATGAATGTGAGGATAGAGAGAGGTTGGAGCAACGTTCTTGGGAGGCATAAGGAAGAGCAAA
TGCTTCAAGATCCCCGCAGCCCAAACTCCTACCTGCTTTGCCCCCTAATGCAGTGTTCCTCCGTAGCTGT
CCGACCTCTTCAGATCTCTTAGTCTACCCTGCCATCTTCCTTTATGCCATGGGTCCCACTGTTCTTTCAA
CTCATCCCCCTTTCCCTCAGTGCAGAGTAGCTGCGGCCAGCAGAGGGTAGACTGAGAGCAGGAGAGAAGG
TCCTGCCCAGGAACCCATTCTAGAGATGCTGCATTCTGCCTGGGAGCAAGTTTTCCAGGGCAGCTTTGAG
AAGTCTTGCAGAAACAAACCTATTTGACCCACATGATATGGGAATGACAGAAAGTAATACAATTTGCACA
GTGCTTTTCCATGGGAAAAGTAGAGCCTTTTCGCGAGGTTTTGAGTACATAGAGAGTGAAGGTTGACCTG
GAAAGGTTATCCTCCTGGATCCCATGTTTTTTCTGAAGAACTACCTGTTAGTTGCAACTTGCACATTAGA
ATATGAAGTCCTACCGAGAGAGATACGGAGAACTAGATAAATACAGATACTTTTGTATGTGAATAAACGA
TTCCACAATACACACATCAAAATCCATACCAGTTATTCCAGAGAGATGGATTGGGCAGAAGGCAGAAGGA
GAATACTCTGATCGTTTTTTGCCCACGTGTATGTATTATCTCAGTGTTTCTAAGAAGCGTTTGCTACTTT
AGATTTTTTTTTATAATAATAATCTTTTAAGTATGAGAAATGTGCAGACAGGATTAGTGATTGAGAGCCA
TTTGTGCTTGTGGCAATCATATGGTACTTTTATGGGAATATTAGAAAGGCACTGGTAATGACCTTGTTGC
AGCACAAAGGAGAGGGTGTGGGGTGCCCCTGCATATTGTCCCACCTCTTGTGACGTGTATCGTTTTGGAA
TTTCCAGTGGCTTGATCATGAACTACTGCAGGAATCCAGATCCTGTGGCAGCCCCTTATTGTTATACGAG
GGATCCCAGTGTCAGGTGGGAGTACTGCAACCTGACACAATGCTCAGACGCAGAAGGGACTGCCGTCGCG
CCTCCAACTATTACCCCGATTCCAAGCCTAGAGGCTCCTTCTGAACAAGGTAAGGAGCCTGTGGCCAGAA
ACCTACACGTTTCGATGCTGGGATGAAAAGCCATGGAAATTCCCACTGATGCAGCAGCCTCCAATGGTAA
ACGGATGCTCGAGTGTTGACTGAGTTCTGTCATGTAGGAGGAAGCCTCCGTGCACTCTCTGGGGGAGCCA
GCGGATTGATTTCTGGTACAACGTTGGGTGGGCTGTGTCTTTAGAATTGGCACAAACCCTCCAGGGTGAT
CGACTTCACAACTCACCTCGTTGAAAAATGGGCTATCTCAGTGTCTTAGCCAAAATTTTTATTGTAACAT
GCTGTCAGATGTGTGACTCTTTCCAAGCCAGTAAGCTTTTCCTGGGACTTCTTCAATTAGCCAGCATTCA
GTGCAATCTTCAGCATTGCAGATTCAGAGAAATGTGGCTCTGGAGCCTGTCACCCTTGAGAAACAGGGCT
AACAGGGTTGCATTAATTCCAAATCACCCTGGTTCTATGGAGCAGTACATGAACTCCCAATGATCTATGT
TTCAGGACTTCCTCAGTCATAGGTGGGCTCTGCAGCCCTAGGTTTTTAAGTGAGTGACTGCCCCGTGTTC
TGGTGGCAGTTGTACCTGTGAGCGGTCTGGATAGAAAGAGTCGGAGACTTCTGTATTATTGCAACTCAGG
ATGTGGGTCATGAGAGGATTTCATCTCTCCTGCAGGGGAGTAAGCTGTTCGCCTCCACCCATCCCTGATA
ACTGAAGTGTCTTTGTCTGCAGTCCTAGACGAAGGACTGTTGTCTCTCCCATGGCCCAGAAGCTGAAGAC
CTTGCCTTTTGTTATGAAACGTTCATTGTTTTCATGTCTGTCCGTTTCTCTGCCCCTAACACCCAATCAC
CATGTATGGCCTGTACCCCCAAATGCATCGTGCTTTGCTGTTTGCTGCCCCATAGTCCTCATGAACATTC
AGTAGAAATTCCCATAAATGTGCTTGCACGTGAGCACAGTTTCCATTGAGAAGCCCTCTCATTTGTCCTT
TTTTTCTAAGCTTTTATGTGAAATATTTCTAAGAACTTACTACAGTTCTAAAGTGTTAGGAATTTGTTTC
TTTGGTGTTTTTGTTTGTTGGTTGGTTGTTGCTTTTCTCAAGTCCATCTGCCTACAAATAAAGAAACAAG
AATGTTACTTGTCATATTCTCCTGAGGTCATAATTCTCAGAGACTTTTTTCTGGTTTGTGCCATAAGTGG
CTTCACATGTTTGTCTCTTCTTGGAAACACTCAGTTTGATTTCTTTTCTTTTCATTTCAGCACCAACTGA
GCAAAGGCCTGGGGTGCAGGAGTGCTACCACGGAAATGGACAGAGTTATCAAGGCACATACTTCATTACT
GTCACAGGAAGAACCTGCCAAGCTTGGTCATCTATGACACCACACTCGCATAGTCGGACCCCAGCATACT
ACCCAAATGCGTATGTCTATTTTCTTTACCATAAGTGAAGGAAGGGTCAGTGGAAATTTCTGTTAGTAGA
GTCATGCTTCAAGCTGAGTGTTCAGGACTCAAGTTGTCTCAGATGAACAGTGCATAGCAAAATGTCTCAG
GAACATTGTCTTTGAGCAAAGAGTCTAAGAGAAGACAAATGTTAATCTGGCTCTCCTTCCTCCTAGTTTA
ATGGAGCAGAAAGGTATCTGGAGGCAAGGATATCACATTAAGAAACAAGTCAAGATGACAAATGATGAAA
CTCTTAGAGTACCCTTCCACAACACCCACTAAGGTTCAATGCAGCCTTTTCTCCTTGGAATTCTATTAAA
CTAAACTCCAATTCCTGAAGTGAAGGTTCTGTTGGGGTTTTCTGTTTTGGCTTACAAGGAAAGTATATAT
GTATATCTATGGAGAGGCAAATCTATCTCTTTCTATATCTACGTCTATTCCAATATGTAGAAACACAGTC
GGTTCTGACCACCAGTGGTCTGAAGGGATACTGGTTGTTAGAGAATAAAAATGGCAGGAAGGCAGATGAG
AGTCAGCAAAGAGAGAGATCCTGTAAAGTAAAAGGGTGGATAGATGGACAGAAGCCCAGGTCTGACCAGC
CCATGGCCAGGCTTTAGGCCATAAGTGACACCAAAGACATGGAAAAATGGTTTCTACATGTTGGACAACA
GACAGTAGTGGACCAAAAGAATAGTGACAGGGGGAACAATGAGATCAACTCCATAGATACCTTGGCTTTC
TTCCTGGAGGCCCTTCTTGCACTGAAGAGCAAGGTGATGGAGCCCAGATGGACTGTAGCCATCTTCCTGA
ATGCAGGAGAGAGATTGGAATTTGGGACTACTGTGGTAGCTAGGATTTTATAGGCCTGCTGAGAATGAGA
ATGGATTTGTGGATGAAAGGAGCTCCAGGGGCACGCATAGTAGTCTCCTCGAATCTTTGGCTAAACATGA
CGTTGCATGTGCCCAGAAAAAGGTTCCACAAGAAAGTAGAGAAAAGAATATATCCTGAGGAATAGCAACT
GCGATTGAACAGTGAGCTCAATAAAGAGGACAGAGCCCTCATAGCATTCTGGGATACTGGAGTTCTGACC
AGCTGGAGGAGAGACCTCACTGAACCTCTTGGGAATACAGTAGAGACTCCAGAAAAGTCATACTTTAGGA
GTAGAATTAGTAAATTTCTAGAAAAAAAGGCAGCTCTAGACAAACCCTGGCAAAACTGAAAAGCAAGTCT
CCAAGCATTAAAATCATTTCCAAGTCAATTAACTGCCTGGGAGAGGAAAACCCTCTTTAGAGGTAAACAA
CAAAGTCAAGTGGCTCAGCTATGTGGTGTTCACAGTGTGAGTTCTAAATTTAAAACTTGACTACACATAG
AGAAGCTTTTAGTATGAACCATGACCAGGTGAAAAATCAGTCAATACAAATAGACCTAGAAATGACAGAA
ATGATTAGAATGGCAAAAAATTTGACATATCAATATGTCAACTGAGTTTTAGGTTTTAAGAAAACATGAA
TACGGAATGAAGCAGATACCATATCAAGAGACAGTAACAGTATAGAAGAGCCAAATTAAATTAAAGAACT
AGTATAAGAAGGTATGTCTTAAATGAAAAAATTACTGGATGTATTCCCAATGGAGTGAGATGTTTCAGAA
GTAAAAACTAACTGAAAAACAATTTTATACCACCTACAGAACCAGCTACACATACACAAATGACACACAC
ATATACACACATACTCACACATGCACAGGCTTAGAAACATGCACGCACACACACACACACACACACACAC
ACCTCCACAAATACTAAAAAATGAAATCCACTGATCCTCACAGACAGGGGGGAAAATATAAAAAGATTTC
CTGCATGTGGGTAGGAAGTCACAGAAGGAGAGGAAGGAGAGATTGCTACAGGAACAAATACTGGAAGCAA
GGATAGCTAAAAACTTTTCAAATAAGAAGAATATTAAAAACCACAGATTCAAGAAGCTGAATGAATCAGA
CAGGGAATTTCCAAAAAAAAAAAAAAAAAAACTGTATGATTCACTTTTGTACATCACCGTTCAACAGTCA
GAAGGCAAAGATATAATAACAAGAAACATCTCATGAGAAACTGGAGGAAAAAGAGCTGTGTCTTGCTAGA
AGAACAGTGATACAAATTGCTAATGCATTCTCATCAGAAACACTGGAACCCAGTTAACAGGGGATATCAT
TAAAATGATAAACTAGAAAAAAAAGAGATCAAATGAGAATGCTACATCCAGCAATAAAATGCCTTGAAGA
TCATCCATGTTGGATAAATGCATATTGTGCACTGCCCCAAATAAATAAACCAAAAACTAATAATTTGGAA
TCAGCAGGCTTGTGTAACAAGAGATGTTGCCCAAAGAAAATTAGCTAGAAGAAGAATAGTTCAAGAGGAG
AACTTTCTGCAGCCCACGTAATGAAGAACCCAGCAAATGGCAAATGTAGATGTAAATGCAAAATATTTTC
TTGATCAAATTTCTATATCTTTTTAAATGAGAGTTGACTACTTGAAGCAAAATGATAGCAATATATTTAA
CTTTAGCATATGTAGAGGTAAAAATTTGAACATATAGACTAAATCATGTGGGGAATAATTGGAAGTGTAC
CATTGTAAGTTTCTTACCTTATCCACGATGGTATGTAATATTAATGAAAGGTTGAATTTGTGGGTCCAAA
GGGATATTGTAAATCCTAAAGCAATCATAAAATTTTGAATTCTGAGGGATATTATATAATAAGAATTTTC
CATGTATCCAAAAGAGGGAAGCCAAGGAAGAAAAAGAAGTCTTTCAAGTACTCAAGCTCTGAGCACATCC
AGTTGCTCATTGAACCAGCTTCCTGGAATGGAGGGTCTGGGCTTGAGACTAGGTCACATGTGTAGAGTCT
CTAGAGAGACAGTGTTGGATCCCCATGGCCCATAATACATTTCCCGTTTTCCCAGGCAGCCACAGGTCAC
GAATGGGAGGATTCTGAGAGGTTGGAGCAATGTTCTTAGGAGGCATAAGGAGGAGTGAATGCTCTGAGAT
TTCCCCAGCCTGAGGTCCTCCATAGCTGCCCGACCTCTTCAGACCTCATAGTCTGCCCAGCTGTCTCCCT
TTATGCCATGAGTGCCACTGTTCTTTCAACTCATCCCCCATTCCCTCAGTCCCGGAATTGCTGTGGCCAG
CAGAGGATGGACTGAGAGCAGGAGAGGAAGTCCTGACCAGGAACCCATCCTAGAGATACTGCATCCTGCC
TGAAAGCTAGGTTTCCAGGGCAGCTTTGAGAAGTCTTGCAGAAAGAAACCCACTTGACCCACCTGATACG
GTATCGACAGACAGGAATACTTTTTGTGCAATGGTTTTACATGCTGAACATAGAGCCTTTTGGCTACATT
TTGAGTACATTGAATGAGACTGCTGGCCTGGGAAGGATATCATGCTGGATGCCATTTTTTTCTCTGGAGA
ACTATGTGTTAGTTCCAACTCGCACATTACTATATGAAGTCCTACACAGAGAGATACGGAGAGCTAGACA
GATAGAGATACTTTTGTATGTGCATAACCAATTCCACAATACACACGTCAAAATCCATACCAGTTATTCC
AGAGAGATGGATTGGGCAGAAGGCAGAAGGAGGATATTCTGATCCCTTTTTGGCCACATGTATGTATAAT
CTCAGTGTTTCTAGGAAGTGTGTGCTGCATTAGATTTTTTTTCTTTAAAAAAAGTGATAATATATTAAGT
ATGAGAAATGTGCAGAGAGGATTAGAGATTGAGAGCCATTTGTCATTGTGGCAATTGTATGGTATCTCTT
TTGGGAATATTTCAAAGGCACCAGTAATGACCTTGTTGTAGCAAAATATACAGTGTTCCTGCATATGTAC
CCATTTTTTGTGATGTGTATTCTTTTGGAATTTCCAGTGGCTTGATCAAGAACTACTGCCGAAATCCAGA
TCCTGTGGCAGCCCCTTGGTGTTATACAACAGATCCCAGTGTCAGGTGGGAGTACTGCAACCTGACACGA
TGCTCAGATGCAGAATGGACTGCCTTCGTCCCTCCGAATGTTATTCTGGCTCCAAGCCTAGAGGCTTTTT
TTGAACAAGGTAAGAAGTTGTGCCAGACATTTACCTGCTTGGATGCTGGGATGAAAAGCCATGGATACCC
CCACTGACGCACAACCCTTCAGTGCTACACTGGTTCTCGTGTGTTGGTTCTGGGTCTGCCATGTGGGAGG
AAGCCTTAGCGCACTCTCTGGGGGAGCCAGAGGTGTGATTTTTGGTGCAACCTGTGCGAGCTGTGTCTTT
AGGATGGGCGGAAACCATTCTGGGTGCTCGACTTCACCACTCCCCTCATTGTAAAAGGGGCTATCTCATT
GTCCTAGACAAAATTCTTATTGTAATATGCTGTCAGATGTGTGTGTCTTTCCAAGCCAGTAAACTTTTCC
AGGGATTTCTTCAAGTAGACAGCATTCAGTGCAATCTTCAGCATTGCAGATTCCGAGAAATGTGGCTCTA
GATCCTGTTATCCTTGAGAAACCTAACTGGGTTGCATTAATTCCATATCTCCCTGGGTCTGTGGAGTAGT
ACATGAGCTCCCGAAGCTCTATCTCTCAGGTCTTTTTCAGTCCGAGGCAGGTTGTGCAGTTCTTAGCTTT
GAAGGGAGTGATTTTTTCGTGTGCTTTTGCCTCTTTCTGATGGAACTTGTACCTGCGGGGGGTCTGGAGA
AAAAGAGTAGTAGACTTTTGCTTTATTGCAATGCATTATGCTGGGCACGAGAGGATTCCCTATCTTATTG
TAGGTGATAAGCTTTTGGCCTCCACTCATCCCTGAGAAGTGAAGTGTTGTTGCCTACAGTTTTAGCTGCA
GGACTGTTGTCTGCCCCATCACCAGGAGTTTAATGCTTTCTTTTTTGAGCAATCATCTAGGGACACATGC
AAGGTTTTTATATGTCCTTGCCTCCTCCCCAAAAAACCATTTTAATGCTTGGAGACTTGCTTTTCAGCTT
TGCCAAATGCATCACCCTTTCTTCTATGCTGTTCCATGTCGTCATGAACACTCTGTAGAGATTCCTAGAA
ATGAGCTTCCATGTTAGTGGAGTTTCCGATGAGAAGCAATCTGATATTTCTTTTCCACTAAGTTTTACAT
GAAATATTTCTAAGAACTTACTACAGTTCTAGAATGGTAGGCATCTCTTACTTTCGTGTTTGTTTGTGTG
TTTTCTCATGTCCATTTGCCTATTAATAAAGAATAGAGAATGGTTGTAAATCTCAGTGACTCTTTTTTGG
TTTATGTCATAAATGGCTTCCTGTATTTTTCTGTTCTAGGAAATAATAAGCTTGATGTCTTCTGTTTTAA
TTTCAGCACTGACTGAGGAAACCCCCGGGGTACAGGACTGCTACTACCATTATGGACAGAGTTACCGAGG
CACATACTCCACCACTGTCACAGGAAGAACTTGCCAAGCTTGGTCATCTATGACACCACACCAGCATAGT
CGGACCCCAGAAAACTACCCAAATGCGTACGTCTTTGTTCTTTACCATAAGCGAAGGAAGGGCCAATGGA
AGTTTCTGTTAGAAGAGTCATGCTTCAAGGTGACTGCTCAGGACTCAACTTGGCTCAGATGCAGAGGAAC
ATTTCCTGTGAGCAAAAGTTCTTAGAGAAGACTTTGTTTTTTTGAGACAGAGTCTTGCTTTGTTGCCCAG
GCTGGAGTGCAGTGGCATGATCTCGGCTCACTGCAAGCTCCGCCTCCCGGGTTCACACCATTCTCCTGCT
TCAGCCTCTCTAGCAGCTGGGACTACAGGCACCCACCACCACACCCGGCTAATTTTTTGTATTTTTAGTA
GAGACAGGGTTTCACTGTTCTAGCCAGGATGGTCTTGGTCTCCTGACCTCGTGATCCGCCTGCCTCAGCC
TCCCAAAGTGCTGGGATTACAGGCGTGAGCCACCGTGCCTGGCTGAGAAGACATTTTTTAAGCTGGCTCT
CCTTCCTCCTAGTTTTATGGAAGCAGAAGGATATATGGAGTTGAGAAGATCTTATTAATAAAACAGCCGG
GATGACAAATGACCAAAGAGTTAGAGTATCCTTCTACAACATCGGCTGAGGGTTAATACAACCTTTTCAC
CTTGGAATTCTATCATTCTAAGCTCTAGTCCCTGAAGTGAATGTTGTGTTGGCCTTTTGCATCTTGGGTC
ACAGGGAATTGATACTTGCACATCTATGGAGAGGCAAATCTTTTTCTATCTACTTCTTTTTCAATGGGTA
CAAACACACTTGGTCCTGAGCACCAGTGGTCTGAAGAGATACGGTCTGCCCAGAGGAGAAGAACAAAGGC
AGGAAAGCAGATGAGAGTCAGCAAAGGGGCGATGCTGAAAAGTAAAAGGGGGGGGTAGATGGACAGAAGC
CATGATCTGGCCATTCTATGGCCAGTCTTTCGGCCATAAGTGACTACCAAAGACACGGCAAAACGGTTTC
CACATGTTGAACAACAGATGCTAGAGGACCAAGAGTATTGCAAGAGGGAGAAAATGAGATCAACCCATCA
ATGCCTTGGCTTTCTTCAAGGAGACCCTTCCTGCACTGAAGAGCAAGGAGATGGAGCCCAAGCTGACTGT
AGCCATGTTGCTGAACAGAGGAGAGTGATTGGACTTTGGGATTACTCAGGTAGTTAGGATTTTCTAGCCA
TGCTAAGAGTAAGAATGGACTTGTGGAGGATAGGAGCTCCAGGCATAGAAGTCTCCTCAAGTGTTAGTCT
AAACATAAAGCAGCACTTGCATAGAAGATTTTCCACAAGAAAATATGGCAAAAAAACACCATATATTGAG
GAACAACAACTACAAGGGAACAGTGAGCTTAATAAAGGTGACAGAGCTCACATAGTGCTCTGGAATATTG
GAGTTTTGACCAGCTAGAGAGAAGAGACCTCATTGAAAATCTTGGGCATTCAGTAGAGACCTCAGAAAAG
TCAGACTTTATGAGTAGACTTTGTATATTCCTAGAATAAAGGCAGCTCCAGAAAAAACCTAGCAAAGCTG
AAAAGCAAATCTCCAAGCATTAAAATGGTGTCCTAGTCAATTAACTGCCTTCTAGAAGAAAACTCAACAC
TCTTTACAGGTGAACAACAAAGTTAAGTTGCTGAGCTATGCAATATCCACAGTGTGAGTCCTAAATTTAT
AACTTTACTACACATAAAAAAGCATTTAGTGTGAACCATAACCAGGAAAATAATCAGTCAATAAAAATAG
AACCAGGAATGATAGAAATGATTTAAATGGCATGAGAATTTGACATATTAGTATCATAACTGCATTGCTG
GATTTAAGAAAACATAAACATGGAACGTAACAGATATCATATCAAGGGAAAGTAAAAGGATAAAAGAGTC
AAATCAAATTAAAGGACTATTAAAAGGTATATCTTAAATGAAAAATTCACTGGATGGTCTCCCAATCAGG
TTAGTTGTTTCCAGGGAAAAAATTAACTGAAAAATAATTCAATAGAATCTACAGAAATAGCTGCACATAT
ATACACACAATGGCACACGTGCACACACCCACACCCACACAGGTGTGAATCCTAGAGCCACACGAGCATT
GAAACATAGAGAAGTAAAAATTGTTCATTGAGGAATATGTAGCAATGCTCAATGTGTTTTACCCTAATAA
GAGCTTTTGTGATGTATGATTGAAAAACTGACACAACTGAAGAGAGAAATAGATAAGCCCACACTCTGAG
TTAGAGATTTCCTTGATTCTCTCACTATGGTTATAAATCTTTCCCAAACACAACAGGCTAGAACAAATAT
GCAGAAAATTAGACATAGTATCTTTGTTCTCAATAAAAACGTCGACCTATTTAACATTATACCGAACTAC
CGAGTACACATTAAAGTGTGCATGGAGCATTCACTGAGGTGTACTCTACACATGACCTTCCAGCAAGTCT
CCATAGATTTAAAAGAATTAAAGTCATACAGAGTGTGTCACTTTATTCTCCCAGAATAAAGTGAGATATG
AATAATGAGAAGTTTGCCAGCTTCTCAAATATTTGGGAGTCATACGGTGCATTTCAAAATACTCTTTGGG
ACAAAGAAAACATCACTAAGGAATTTAGAAAAGTTTTGAACTGAGTAAGAATATAACACAATTTATCCAA
ACTTAGGAGATGCAGTGAATGTCTTTAGGCTTTTACATAATTTTAGATGCTCTTAGGGAAAAACAGAAGC
ATGTAATAATCAAGATTTCAAACTGCAATTCTCAAAGTGTAGTCTAGAGAAACCTGAGGACCTTTGAGTA
CCTTCAGAGACAGTCCATGAGGTTAAAGGACTTTGCTACGTGAAAAGTAAGATGCTATTGGCCCTTTTTA
CTTTCATTTTCCAACAAGAGAAGAGGGGAGTTTTCCAGCAGTTACATAATATGTAATGGCATCATGTCTC
TGATGGCTAAGAAAATGGGCAATTGTTGACTTTGTGTGTTAAAAAAATTCTCAGTGTTGGTTTCTTATAC
TATAAATATTCATCTTGTGTTTTGAAAAAGAAAAGCTCTTTGGAATCCCCTATGAACAAAGACTTTGACA
GTTGTTGATCTAAGACCACAGCTTAAATATCTACACAAGAAAAAAAAAAAAAGCAAATAAGAGCCAAGGA
AAGCAGATGGAAGGAAGTAGTCCAAACCAGTGACATTCAGTGAACAAGAAAAGAGACCAACAAGGGAGTA
AACTCTTGAAACAGAAAGTTGATTCTTTGAAAAGATCCATATGATTGAACACAGTCTGGCTAAACAAATG
ACAGACCAATGAGGGTGCACAACCATCACCATCTGGAGTAACAGAGGAGAGGTGCCATTACTATAGCATC
TTCCAGTTCTGAAAGCTGAAAAGAAGATTTTGAGAACAATTGTATGTGAATAAATTCAGGAATGTTAATC
ATGTGGGCCAATTCCTGAGGAAGACAACAAATCAGCAAACCAGATGCTGAATAGTTAGTGTAGTCCTGTA
GAGAGACATACAGAGAGGCTGACAGAGAAATATTTGTATGTGCATAAAACAATCTACAAGACACACTTCA
AAATCAATCTCAGTTAATCTGGAGGAACATATTTCACAGAAGGTGGAAGGAGGGTATTCTGATCCTCTTG
TACATTGTACAACATTGTACAATGTACAGAGTATAATTGTACAAGTACAATTGAAGTTGTACAAGTACAA
GTGCAACTTGCACAATGTACAGAGTAAACATTGATGTTTACTCTCAATTTTCTTATGGAGCACAGATGAC
TTTGGATGTGTTACAATATGAATGATAATTTGTCTTTGAGATGTTCGCAGTTGTTTAGAAGTTGAGGACC
ATTTGTGCATATTATGGGACCTTTAGTGAAAATATTTCAAAGTCTCTTTTTACACTTTGTTACAGCAAAA
TGTAGAGGGCGCTAAGTGCCCTTGAATCTTCTCCCATCTCTGGTGACCTGTGTTGTTTTGAAATTTGCAG
TGGCCTGACCAGGAACTACTGCAGGAATCCAGATGCTGAGATTCGCCCTTGGTGTTACACCATGGATCCC
AGTGTCAGGTGGGAGTACTGCAACCTGACACAATGCCTGGTGACAGAATCAAGTGTCCTTGCAACTCTCA
CGGTGGTCCCAGATCCAAGCACAGAGGCTTCTTCTGAAGAAGGTAGGAAGTCTATGGCCAGACAACCACA
CCCTAGGACGTTGGGATGAAAAGAGTTGCAAAATCTTAGTGATATAGAAGCCTTCCATGCTCACACAATT
CCAAGTAGAATGTGGACTCAGGGTCAGCCACTGGGAAGGAACACTCAGCGCCTTCTCTGGGAGAACCAGA
GCTGTGATGTTTGGTACCCTGTGAAAGGGTGGTATCTATAGGAAGGGTGCAGACCCTCTAGGGCACTGGA
CTTACCACTCCCCTGGTTATTCAAAGGATCATTTTAGTGTCTTAGCCAGAAGAATATTCTAACATTTTGC
CAAATTTGTGAAGATTTACCAAGCTCATGATAAGCCTTTCATGGTATTTCTTCAAGTAGTCAGTGTTCAT
TGCATCTTTGGCTTTGCGGTTTCGGAGGAATGCGGTTTTTGAGTCTGTCATCCTTGAGAAACCTAATATG
ACTTTTCTTAGTTCCATATACTTCTGGGTCCAGGTAGCAGTACATAGCCAACAAATGCTCCATCGTTCTG
GCCTATCTCCATCTTAAGCCAGTCCTGCACAACTAGGCTTTGATGGGAGGGATCTCTCAGTGTTCTTGCC
CCTCCTTCTCATGGAACATATATCTGTGTTGGTCTCTGAGAAGAAGAGTAGTGGATATCTACTTTGTTGC
AATGCAGAATCCTGGGCCAAAGATACCAGCCATCCCTCCAAGGGAATAAAATTTTGGCCAGTAGCCCTCT
CTGAGAGACAATTTGTCTTTGCCTACGAGTCCTAGATGCAGGACCGCTTCCTGCCCCATCTTCAAGAAGC
TGAAGGCTTTGGCTTTGGAGGATCAGCAGTCTAGGGAAATGTGTGACGGTTTCATGTCTGTCCCCACTGA
CAGTCAATCACCACCTACAACCTGCACAGCCTGATGCATAGCAGTCTAGTTTCCTGCCTTATTCTCAGGA
ACACCCAGAAGATGTCTATATTAAAGAGCATGCACATGAGTGCAATTTTGACTGATAGGCACTCTGATCT
TTCCTTTGGTGCCTGTGTTTTAAAGGAAATCTTTCTAAGAACTCGTTAAAGTTCTAGAATGCTATGAATC
TTTGGGTTTTATTATTGGTATGTCCATCTGCCTGCTAGTACAGAACAGAGCATGGTAGTCTTTCTCAGAG
ACAATGATCCTGTTTCAGTCACAGATTTCTTCTGATGCTTCTGTGTTCTAGAAATTACTCAGCTTGATTT
CTCCTCTTTGAATTTCAGCACCAACGGAGCAAAGCCCCGGGGTCCAGGATTGCTACCATGGTGATGGACA
GAGTTATCGAGGCTCATTCTCTACCACTGTCACAGGAAGGACATGTCAGTCTTGGTCCTCTATGACACCA
CACTGGCATCAGAGGACAACAGAATATTATCCAAATGGGTACAACCTTGAGTTTTCTTCAAAGACAGACA
GCAGCCCCCTTACATTTCTCTTGGAAGGGCCATGCTTCCAACTAACTTCTTATGACAAATTTATCTCAGA
TCTGGAATGTTGGGTAGAATGTCTCAGGCTTCTTTCTTCAGGCACAGTGTCTGAAAGGAGAGAAATGTCA
GGCCAGCTCTCTTTTCTCATAGTTGACAGAAGCAGGAGGATATTTGAAGGTGGTGAGTTCTCATGAATAG
AAAGCTCAGGACACATGGCCACGTGCTTAGAAATAGCACCATTCCACAATGCCCACTAAAGACCAATGCA
ATAGTTCAACCAGGGATTTCTGTCATTCTAATCTCCAAGTCCTGAAGTGAAGGTTGTATTAGCCATGTTC
ATCTTGGGCAACAAATAAAGGATATCTATGTTGACATCCAGATCTTCCAATCACTTTCTCCTCTAACCTG
TACCTGGGTTCTGAGAACAAGGTATCTGAAGAGCTATGTGTTGCCAGCACATGAGGGGCAAAAGTAGGAA
GGCAGCTGAGAGTCAGGAAGTATAAAGATTCTGAAGAGTTACACATGCAGGAAGATGGACAGAAACCCAG
TTCAGACCACGTCAGCGTTTCTGCCATGAAGGACTATCAAATACATAGGAAAAGTGTTTTCATAGGTTGG
ACAACAGACATGACAGGCCTGAGAAAATTCAGAAAGGGAATCAAAGGAGATCAACCTTATCATGTCCCTG
GCATCCTTCCTTGAGACCCTTGAAGGGCAAGCAGATGGAGCCCAGCTGACCACAGCAGTCTTGCTTAACT
GAGGAGAGAGACTGGAGTTTGTGATGCCTCAGGCATCTGACGTATTCTAGGCTGGCTAAGAATGAGAGGG
GATTTGTGGAGGAAAGGAGCTCCAAGAATACACACCGAAGTCTTCTCAAGGCTTTGGCTAAATACAAAGC
TGCGTATGCACAAGGAGAGTTTTCACAAAGAAAGAACAATAAAGAAAAGCTACTGGGGAAAGAACAACTG
CAAGGGAACAGTGAGCTCAATGGAGATGCTAGAGCTCACATAGCACTGGGGGATATTTGAGTTCTGACCA
CTCAGAGGAGAGACACCTCACTGAACATCTTGGGCATTCAGTAGAGGTCAAAGAAAGCCATAATTTGGGA
GTAGGATCTTCGGATTCCTAGAAATAAGGTGACTCCAGAAACACTCCAGCAACCCTTCTTCCAAGCCAGT
CTAAAAGGATCCAAATGATTTCCAAGTAAATTAACTGCCTTCCAGAAAAAAGTAAACTCAACCCTCCTTA
GAGGTAAGGAACGAATACAAGTTTCTCAGTTATATGACATCCCCAGAGTGCAACTTGCATTTAAAAATTT
ACTAGACACAAAAGAAGTTTTCACTGTGATCCATAACTGGGAGAAAAATCACTCAACACAAATAGGCCCA
GAAATAATAGAAATTATGGCATTGGCAAGAACATTTAAAATGCACCTCTGAGAACTGTGTTTCAGGAAAA
TGTCAGCAAAAGCTGACCATGAGAGAAATGAATGCATAATATCAGAAAAGAAAAGAATTGAAGAGCCAAA
TGGAAATTTAAAAACTGAGAAAAGTTATATCTGTAATGAGGAATTCACTGGATGGCCTTATAACCAGTTT
AGATATTATGGTAGGAAAAGGTGAACGAGAAAATGATTCAATTAAAGCTAGACAAACCACAAGACAGACA
GACAGACACAAATACACATACACACAATGACTGAACCAATTAATCAACAGAGCCTCAAGGACATCTAGGA
AAACATCCACACATTTAATATATGTGTTAGGCAAGTCACAGAAAGAGAGGAAAAAGATAATGTGACAGAA
GTTATACTTGAAGCCATGACGGCTGACAAATTTCCAAACATACAGAAAATGAGAAATTCATAGTCATGAA
GCTCAATGACTCAGGTATAGATTTTTAAAGAGCAAAACTCTGATTTACTGGGGTACATCATAGTTAAATT
GTCTGATTTCAAAGCTAAGAAGAAAAAAAGGGGGTTCCTATGAACAAACATTTTGACAGTTGATCTAAGA
CCACAGCTTAAATATCTAGGCAAGGAAAAGCAAATAAGACACAAGGAAAGGGGATGGATGGAAATAGTCC
AAACCAATGACATTCAGTGAACAAGAAAATAGACCAACAAAGGAGTAAATCCATGAAACAGAAAGTTGGT
TCTTTGAAAAGATTCATGTGATTGACCACAGTCTGGCTGAACAGATGACAGACCAAGGAGGGAGTACAAC
CATCACCATTTGAAGTAACAGGGGAGAGGAGCCATTGCTATACCATACTCCAGGTCTGAAAGCTGACAAG
AAGATATCAAGAAAAACTGTATGTGAATAAATTCATGAATGTAGATCATGTGGATCAATTCCTTAGGTAA
ACAACAAATCAGCAAACCAGATACTGAATAGATTGGGTACTCCTATAGAAAGACATACAGATAGCCAGAC
AGAGAAACATTTGTACGTGCATAAAACAATCTACAAGACTCACTTCAAAATCTCTCAGTTAATCCAAAGT
AACATATTTGGCAGAAGGTGGAAGGAGGGTATTCTGATCCTTTCTTGTACACATTGATGTTTTCTCTCGG
TTTTCTTATGGAGTATAGACGAGTTTGGATGTGTTACAATAAGAATGATAATCTGTCTTTGAAATGTTCA
CAGTTGTTTAGAAGTTGAGGACGATTTGTGATTGTTACAGGACCTTTAGTGAGAATATTTCAAAGTCACT
TTTTACCACTTTGTTACAACAAAATGTAGAGGATGTCTGGTGCCCTTGTATCTTCTCCCATCTCTGGTGA
ACTGTATTGTTTTGTAATTTGCAGTGGCCTGACCAGGAACTACTGCAGGAATCCAGATGCTGAGATTAGT
CCTTGGTGTTATACCATGGATCCCAATGTCAGATGGGAGTACTGCAACCTGACACAATGTCCAGTGACAG
AATCAAGTGTCCTTGCGACGTCCACGGCTGTTTCTGAACAAGGTAAGAAGTCTCTGGCCAGACAACCACA
CCCTTGGACGTTGGGATAAAAAGAGTTGCAAAATCTTAGTGATACAGAAGCCTTCCATGCTGCACGGGAA
TCTGAATGTGGACTCAGGGTCAGCCAATGGGAAGGAAGCCTCAGCGCCTTCTCTGGGGGAACCAGGGCTG
AGATTTTTGGCACCCCGTGACAGGGTGGTGTCTTTAGGAAGCGTGCAGACCTTCTAGGGCACTGGATTTA
CCACTCCCCTGGTTATTCAATAGATTATTTCAGTGTCCTAGTGAAAATGGATATTCTAACATCCTGCCAA
ATTTGTGATGATTTACCAAGCTCATCATGAGCCTTTCCTGGTATTTCTTCAAGTAGACAGTACTCATTGC
AAACTTCAGCTTTACAGTTTCAGAGGAATGTGGTTTTTGAGTCTGTCATCCTTGAGAAACCTGATATGAC
TTTACTTAGTTCCATATCCTCCTGGGTCTAGGTAACAGTACATAGCCAGCAAATGCTCTATCTCCCTGTC
TACCTTAATCTTAGGCAGGTGCTGCACACCTAGGCTTTGATGGAAGGGATTTCTTAGTGTTCTTGCCCCT
CCTTCTCATGGAACACGTATCTGTGTTGCTGTTTGTGAAGAAGAGTAGTGGATGTCTACTTTGTTGCAAT
GCAGGATCCTGGGCCCAAGATTTCCCGCCGTCCCTCCAAGGGAATAAAATTTTGGCCAGTACCCCTCTCT
GAGAGACAATGTGTCTTTGCCTGGAAGTCCTAGATGGAGGACCACTTCCTGCCCCATCTTCCAGAAACTT
AAGGCTTTGGCTTTGGAGGATCAGTGCTCTGGAGAAATGTGTGACGGTTTCATGTCTGCCCCCACTGACA
ACCACCACCTACAGCCTGCACCGCCTGATGCATGGCACTCTGGTCTCCTGCCTTGTTCTCAGGAACACCC
AAAAGAGATCTTTGCCAAAGAACAGGCACATGAGTGCAATTTTGACTGATAGGCACTCTGATCTGTCCTT
TGGTGCCCAGGTTTTAAAGAAAATCTTTCTAAAAACTCATTGAAGTTCCAGAATGCTATGAATCTTTGAG
CTTTGTTATTGGCATGTCCATCTGCCTACTAATGTAGAACAGAGCATGGTCGTCATTTTCAGAGATGATG
TCCTGTTTCTATCATGGATTTTTTTTCTCATGCTTCTGTGTTCTGGAAATTACTCAGTTTGTTTTCTCCT
CTTTGAATTTCAGCACCAACGGAGCAAAGCCCCACAGTCCAGGACTGCTACCATGGTGATGGACAGAGTT
ATCGAGGCTCATTCTCCACCACTGTTACAGGAAGGACATGTCAGTCTTGGTCCTCTATGACACCACACTG
GCATCAGAGAACCACAGAATACTACCCAAATGGGTATGTCTTTGAGTTTTCTCCCAAGAGAAACAGCCAC
CCACTTAAATTTCTCCTGGAAGAGCCATGCTTCCAGCTAACTTCTTATGACCCAATTTCTCTCAGACCCA
GAATGTTGGACAGAATGTCTCAGGCTTCTTGCTTTGGGCACAGGGTCTGAGAGGAGAGAAATGTCAGGCC
AGCTCTCTTTTCTCATAGTTGATAGAAGTAGGAGGATACTTGGAGGTGGTGAGGTCTCATGAATAGAAAG
CTCAGAAGAACATATGACCATGTGCTTAGAAATAGCACCATTCCACAATGCCCACTAAAGACCAGTGAAA
TAGTTCAACCAGGGAATTCTGTCATTCTAATCTCCAAGCCCTGGAGTGAAGGTTGTGTTTGCCATGTTTG
TCTTGGGTAACAAGTGAAGGATATCTATATTGACTTCGAGATCTTCCGATCACTTTCTCCTCTAACCTGT
ATAAACACATTGGGTTCTGAGAACAAGGTGTCTGAAAAGCTATGTGTTGCCAGCCCATGAGGGGCAAAAG
GAGGAAGGCAGCTGAGAGTCAGGAAGTATAGAGATGCTGAAGAGTTACACATTCAGGAAGATGGACAGAA
ACCCATGTCTGGCTATGCCAGCCTTTCTGCCATGAAGGACTATCAAATACATGAGAAAACAGTTTTCACA
GGTTGGACAACAGATATGGTAGGCTTGAGAGAACTGAGAAAGGGAATCAAAGGAGATCAACTTCATCATT
AACCTGTCTTCCTTCCTGGACACAGTGTTGGATTGAAGGACAAGCAGATGGAGCCCAGCTGACCACAGCA
GTCTTGCTTAACTGAGGAGAGAGACTGGAGTCTGCGATGCCTCAGGCAGCTGATGTGTTCTAGGCTGGCT
AAGAATGAGAAGGGATTTGTGGAAGAAAGGAGCTCCAGGAATACACACAGAAGTCTCCTCAAGGCTTTGG
CTAAATACAAAGCTGCGTATGCACAGGGAGAGTTTTCATAAAGAAAGAACAACAAAGAAAAGCTACTTGG
GAAAGAACAACTGCAGGGGAACAGTAAGCTCAATGGAGATGCCAGAGCTCACATAGCACTGGGGGATATT
TGAATTCTGACCACTCAGAGGAGAAACACCTCACTACATTTTGGGCATTCAGTAGAGACCAAAGAAAGCT
GTATTTTGGGATTGGGATCATCTTATTCCTAGAATCAAGGTGACTCCAGAAAAACTCCAACAACCCTTCT
TCCAAGCCAGTCTAAAAGGATCCAAATGATCTCCAAGTAAATTAACTGCATTCCACAAGAAAAAAAAAAC
TCAACCCCCCTTAGAGGCAAGGGACAAATACAAGTTGCTCAGTTATATGGCATTCCTATTGCGTTACTTC
TATTTAAAAATTTAATAGAGACACAAGAAGCTTTCACTGTGATACATAACTGGGAGAAAAAATCACTCAA
CACAAACAGGCCCAGAAATTATAGAATTGATGACATTGGTGAGAACATTTAAAATGCACCTCTGAGAACT
GTGTTTCAGGAAAATGTCAGCAAAAGCTGACCATGAGAGAAACAAAAGCAGAATAGCAAGAGAAAAGAAA
AGAACCGGAGAGCCAAATGAAAATTAAAGAACTGAGAAAAGGTACATCTCTAATGAAGAACTCACTGGAT
GGCCTTATCATCACTTTAGACATTACGGTAGGAAAGGTGACCTAGAAAATAATTCAATAGGAGCTACACA
AATCACAGGACAGACAGACAGACCAACAGACAGAAACACACACACACACACACACACACACACACACACA
CACACACACACACAAAGACTGAACCTATTAATCAACAGAGCCTCAAGGGCATCTAGGAAAAATCCACACA
TTTAATATATGTGTTAGGCAAGTCACAGAAGGAGAAGAAAAAGATATCATGACAGACATTATACTTGAAG
CGATGATGGCTCGCAACACGCCAAATATACAGAAAACAAGAAACTCATAGTCAAGAAGCTAAATGACTCA
GGTATAGAATTTTAAAGAGCAAAACTCTATGATTTACTGGGATATATCATAGTTAAGTTGCCTCAATTCA
AAGCTAAAAAGAAAAAAAGGGGGTTCCTATGAACAACAGCTTTGACAGCTGTTGATCTAAGACCACAGCT
TAAATATCTAGGCAAGGAAAAGCAAATAAGGCACAAGGAAAGAGGATGGAAGGAAATAGTCCAAACCAAT
GACATTCAGTGGAAAAGAAAATAGACCAACAAAGGAGTAAATCCATGAAACAGAAAGTTAGGTTCTTTGA
AAAGTCTATATGATTGGCCAAAGTCTGGCTAAACAGATGACAGACCAAGGAGGGAGCATATCCATCACCA
TCATGAGTAACAGGAGAGAGATGCCATTGCTATAGCATCCTCCAGGTGTGAAAGCTGAGAAGTAGATATT
GAGATCAACTGTATGTAAATAAATTCATGAATGTAGATCATGTGGATGGATTGCTTAGGTAAATAACAAA
TCAGCAAATCAAACACTGAATAGATCATGCAGTTTTATAGAGACTTACAGACAGCCTGACAGATAAACAT
TTGTATGTACGTGAAACAATCTCCAAGACACACTTCAAAATCCCTCTCGGTTAATCCAAAGGAATGTATT
TGGCAGAAGGTAGAAGGAGGGTATTCTGATCCTTTCTGGTACACATTGATGTTTTCTCTCAGTTTTCTTA
TAAAGCATAGATTACTTTGAATGTGTTACAATAAGAATCATAAGCTGTCTTTGAAATGTTGACAGTTGTT
TAGAAGTTGAGGACCATTTGTGAGTGTTATGGGACTTTAGTGAGAATATTTCAAATTTGCTTGTTTACAC
TTTGTTACAAGAAAACATAGAGGGTGCCAGGTGGTGCTGTATCTTCTCCAATCTCTGGTGACCTGTATTG
TTTTGGAATTTGCAGTGGCCTGACCAGGAACTACTGCAGGAATCCAGATGCTGAGATTCGCCCTTGGTGT
TATACCATGGATCCCAGTGTCAGATGGGAGTACTGCAACCTGACGCAATGTCCAGTGATGGAATCAACTC
TCCTCACAACTCCCACGGTGGTCCCAGTTCCAAGCACAGAGCTTCCTTCTGAAGAAGGTAAGAAGCCTGC
AGTCAGACAACCATACCCTCGGACATTGGGATAAAAAGATTTGCAAAATCTTTGTGATGCAGAAAACTTC
CATGCTGCACAGGAAGTCGAAGGTGAAGTCATGGACAGCCAATGGGAAGGAAGCTTCAGTGCCTTCTCTG
GGGGGACCAGAGCTGGGATGTTGAGTGCCTTGTGAGGGATGGTGTCTTTAAAAGGGGCACAGACCCTCTA
GGACACTGGATTTATCACTTCCCTGTTATCAAACGAATCATATTAGTGTCCTAGCCAAGATGGATATTCT
AACATCCTGCCAAACTTGTGAAGATATACCAAGCTCCTAAGCCTGTCCAGCCCTTTCTTCAAGTAGGCAG
TGTTTATTGCAGTCTTCAGCTTTACCATTTTGAAGGAATGCCATTTTTGAGGCTGTTGTTCTTGAGAAAC
CTAACATGTCTTCATTAGATCCGTATTGTCCTGAGACTTTGAAGCAGTACATAGCCACCAAATTGTTTAT
CTCCCCAGCCTACCTTCATCTTGGGCATGCCTTCCACACCTAGGATTTGAGGGAAGGGATTTCTCAGTGT
TCTCATCCCTGCTTCTCATGGAACATTTATCTCCGTTGTTTTTTGAGAAGAAGAGTAGTGGATGTCAGCT
TTCTTGTAATGAGGGATCCTGGGCCCAAGATTCCCTGTCTCCCCTCCTAGGCTATAAAATTTTGGCCTGT
ACTCCTTCTCCCTGAGAGGCAATGTGTCTTTACCTACAAGTCCTAGATGCAAGATCCTTTTCTGCCCCAC
ACCCCAGAATCTGAAGGCTTTTGCTTTGGAGGAGCAGTGGTCTAGTGTGCAAGGGTTTCATGTATACCCC
CCACTAACAGCCAATCACCACCTATAGCCTGAACAGCTTGATGCATGGCACCCTGGTCTCCTGCCTTGTT
CTCATGAACACCCAGAAGAGGTGTAAGCAAAAGACCATTCACATGAGTGTAATTTTGAAGTATAGGCACT
CTGATCTGTTTTTTGTTTGTTTCTTTGTTTGTTTGTTTTCCAGGGTTGAATTAAAATATTTATGACTACT
TATTAAATTTCTAGAATCCTATAAGTCTATTTGTATTTTTATTCTACATTTCAATTTGCATGCTAATATA
GAAGAGTGTAAATTGTTAATCCTCAGATTATTCCACTTTGTGTGTCATAATTTTTTTCACATTTCCCTTT
TCTAGGCAATACTGAGCTTGATTTTCTCTTTTAATTTCAGCACCAACTGAAAACAGCACTGGGGTCCAGG
ACTGCTACCGAGGTGATGGACAGAGTTATCGAGGCACACTCTCCACCACTATCACAGGAAGAACATGTCA
GTCTTGGTCGTCTATGACACCACATTGGCATCGGAGGATCCCATTATACTATCCAAATGCGTATGTCTAT
CATGTTAGCCATAAAAGGAACAATAGTCAACTAAAATTTCTCTTAGCTGGCCCATGCTACAAGCTCACTT
CCTAGGTCCAAATTTCTCATAGACTCAGAGTTTGTAGCAAAATGTCTCAGGAAACTTACTTTTGAGCAAA
AGGTCTGAATGAAGAGAAGTTTTAGGATTGCTATCTTTCATAACAATTTGATGGAAGCAGCAGGATATAT
GGAGGTGGTGAAGTCTCATTAATGTAAAGCTAAGGAGATCAAATGACCAAATGCTGAGACAAAGTATCAT
TCCACAATGCCCACTAAAGGTCCATGCAGTCTTTCAACCATGCAATTCTATCATTCTATCCTCCATTCCC
TGAAGTGAAATTTGTGTTTGCCATTTTTGACACGAATCAGAAGTAACAAATTCAGGCTGGGTGCAGTGGC
TCAGGCCTGTGATCCCAACACTTTGGGAGGACAAGACGGGCAGATCACCAGAGGTCAGGAGTTCAAGACC
AGCCTGGCTAACATGGCAAAACCCCATCTCTACGAAAAATTAAAAAATTAGCCGGTCATGGTGGTGGGTA
CCTGTAATTCCAACTACTTGGGAGGCTGAGGCAGGAGAAACACTTGAGCCTGGGATTCAGAGTTTGCTGT
GAGCCGAGAACATGCCACTGCACTCCAGCCTGGGTGACAGAGCAAGACTCAATCTCAAAAAAAAAAAAAA
AGAAGAAGAAGAAGAAAAGAAGAAGAGGAAGAAGAAGAAGAGGAAGAAGAAGAAGAAGAAGAAGAGGAAG
AGGAAGAGGAGGAGGAGGAGGAGGAGGAAGAAGAAGAAGAAGAAGAAGAAGAAGAAGAAGAAGAAGAAGA
AGAAGAAGAAGAAGAAGAAGAAGAAAATAGAAATGAGTGCATATATTTATATATGAGTACTAGCCTGTAT
GAACACACTGGGTTCTAAGCACCAGTTTTCTGAAGGGATATGGGTTGTCAGGCAGAGTAAAAGCAGGAAT
GCAGATGAGAGTCAGGAAGTAAACAGATGTGGTGATTAAAATGGGCAGGTACATGGACAAAAAAATGCAT
GTCTGACAAAAACTGGCCTCTTGCCATAAGTGAGTATGAATAATATGGAAAAACTGTTTGCACATGTTGA
ACAGCAGACAGTACAACCTGAGATAGTTTAGAAAGGGAAACAAATAAGATCAACCCCATAATTACCCTTC
CTAGACTTAAGGGCAAAGAGTTTTAACCAAAGCATTCCACAGCAGTCTTGCTAAACTGGGGAGAGAGACT
GGAGTTTTGTTTACTAATAAAACCGAGATTTTCTAGGTTAGGTAATAATGAGAAAGTATTTGTGGAGAAA
AGGAGCTCCAGGAATACACACAGAAGTCTCTTCAAGTCTCTGGCTGAACAGAAAGCTGTGTATGCACAGA
AAGAGTTTCCAGAGAGAAAGGAGAACAAAGAACAGCTACTGGGGAAAGAACAACTGCTGGGGAACAGTGA
GCTCAATGAAGATGCCAGAGCTCACATAGCACTGGGAGGTATTTGAGCTCTGACCAGCCTGAGGAGAGAC
ACTTCATTGAACATCTTGGGCATTCAGCAAAGACCCCAAAAAACCATACTTCAGGAGTAGAATTAATGCA
TTCCTAGAATAAAGTCTACTCCAGAAACACCCTAGAAAAGCTTAGAAACCAAGTCTAAAAAGATCCAAAT
GATCTCCAAGTAAATTAATTGCCTGTCAGAAGAAAACAACCTCTTCAGAGGTAAACAACAAAATTAAATT
GCTCAATTATATAGTATGCACAATGTGTGGCATACATTTAAAAATTTGCTAAACATACAAAAAGCATTTA
GTGTGACCCATAACCAGGAGAAAAATCAGTCAATACAAATAGACCCAAAAATGATAAAAATAACAGAATT
GGCAAGGAGATTTAAAATGTATGTATCATAATTGTGTTCAAGGATTTAAAGAAAGCGTGGACAAGAAATA
AATAAATGGATAATATCAACAGAAAGAAAAATTGTAAAAGGACCAAATGGAGAGTCAAGAACTGAAAAAA
AAGACATCTCTTTAATGAGAAAATCACTACATGGCCTTATAATCATATTAGATAGTACAGATGATAAAGC
TAACTAGAAAATATTAGGGTGGTGCAAACCATAGCACGCTTATACAAAGCCTGAGAAGATAAACAGAGCC
TCAAGGACATCTATGAAAATATCAAAATATTTAATATTTGTTTAAAGCAAGTCACAGAGGAAGGGAAAGA
GATATTGGAACAGAAAAAATACTTGAAGCAGTGATGGCTGATGACTTTCTAAATATGGAAAAAATGATAA
ACTCACATAGTCAAGAAGCTCAATGGATCAGATATAGGATTTTAAAAAGTAAAGCTGTATGATTTATTTG
GACACATCATAATTAAATTGTCCATAATCAAAGATAGAAAGTAAAATCTTATTTGAAGCCCAAGGGAAAA
AACATACCTTTACATAGAGTAACAGTGACACAAATGACTGATGCCTTCTCATCAGAAACAACACAAATCA
GAAACAATAGAATAACACCTTTAGAGTGGTAAGAAGAAAAAAAGATCAAATCAGAAACAACAAAATAACA
CGTTTAGAGTGGTAAGGAGGAAAACAAGATCAAATCAGAAACAATGGAATAACACCTTTAGAGTGTAAGA
AAGAAAAAAAGATCAAATCAGGAACAACAGAATAACGCCTTCAGAGTGGTAAGAAGGAAAACAAGATAAA
ATCAGAAACAATGAAATAACACCTTTAGAGTAGTAAGAAGAAGAAAAGATCAGGTCAGAAAAAATGGAAT
AATATGCTAAGAAGAAAAAAAAAGATCAAGTCAGAAACAATGGAATAACACCTTTAGAGTGAAAAGAAGG
AAAAAAACCCAGCAAGCTTAAACGCTATGCACAGCAAACAATTCCACTGAAAATGAATGTTACGTAAGTA
CATATTCTGTCCTCCTAAAAACAAAGAACAAATAAAAGAATGTTTCATCAGCAGGATTATGTAATAAAAG
ATGTGAAAGAATGCTATGTAAGTAGAAGAAAAATAATACCATATGGGAATTGGCATCAAAACCACAAAAT
ACTATCAAAACAAAAAAACTTTATTGATAAATTTAACACAATATGCAAAAGAACTATACCATGTATACTA
CATAACATTGGTGAGAAGAAAATTAGAAGATCTAAATAAAGACACATCATGCTTATAGATTAAAAAATCC
AATGTCACTTTTCACAAAACTGATCTTTAGTTTCAACCCACACCCAAGCAGAATTCCTGCAGTCTTTTCT
TGAAAACCTAACAGAATGTATATGCTAGAATCACCAAGACAATCTTTAAAAAGAATAAAAAACTTGGAAT
AAAATCACAAGTTTGTGGGATAGATGCATATGGTAATATGGAAATTCTCATAAAGACACAGTAATCAAGA
CATGTGGTATTGGCTGGGACGCTTGGCTGTAATCCTAACACTTTGGGAGGCCAAGATGAGAGGATTGCCT
GAGATGAGGAGTTGCAGACAAGCCTGGGCAACATAGCAAGACCCTCATCTCTACAAATATTTAAAAAAAT
TAGCCAGGTTTGGTGCCATGTGCCTGTAGTCCCAGCTATTCAGGAAGCTGAGGTGGGAGGATCACTGGAG
CCCATGAGGTGGAGGCTGAAATGAGCCATGATTGTGCTACTGAACTTTAGCCTGGGAGACAGATTAAAAC
CTTCCCTCTCTCTCTCAAACAAACAAACAAAAAATACATAGTATTGGGCAAAACATATGCAAACAAAAAC
AGAAAAGGGTCAGCATAAATTTACATATATGGTCAATTTATTTTCAATACAGGTAGCAAAGCAATTTAAT
GAGGAAATTTTTTTCCAAAATTGGTCTGAAACAACTGGATAGCCATAGAAAAAAACTATAACAAATGTGA
CGCTTGAATCCTACTGTATGACTCAAATTAAATTAATTTGAGATAGCTCTTAGACCTCAATGTAACAGCT
AATTCTGAGGCTGAAATATAAGACTGCTATGAAAAAGTATAGTATCTTATAACCTTGGAGAAGGAAAAAT
TTTTTGAGGGAAGAACCAGAAAACACTAACTGTAAAAGAAAACAAATGATAATGTGGACATTCATTGAAT
AAAAACTTATGCTCACCAAATATGACTGTTAAGAAAATAAATAAGTAAGTAACACACTGGAAGAAAAACA
CTCTCATCCATATATCTGACAAATGGCCTGTATCCAGAGTATAGAAACATTTCTCCCACTCACTAATCAG
AGGACAAACAACCTAATCAAAATGGGCAACAGGCTTGAATAGTCATTTCTTAGGAGAAGATGCACACAGA
GCCAACAATCACCTGAAAAAGTGCACAACATCTTAGCCATCAAAAATCAAGAGTTATAACCCTCATAAGA
TGACACTGAACATCCAGTGTACATGGATATCATTAAGAAGACACAATAATAAGTGGTGTCACCGATTTGG
AGCTAGAATGTGCCACTCTCTCATATGCTGGTGGAAGTTCAAAATCATACAACAAATTAAAAAATCAGTC
TGATGCTTTCTTATAAAGTTCGATAAATATGCATCTATCCTACAAACCTGTAATTCTATTCTTGAATATT
TACCCCCCAAAATGAAAACATAAGTCCACAAAAATCTATATAAATATTCATAGCAGCTTTATGTTTTATA
AACTCAAAATAAAAACTATTTCAATGTTTTCATCAAAAGAAAATGAAAACTATTTAAATGGTTTCATCAA
AAGAAAATGAAAAAAGAATTTCCAGTATATTTATACAAAGGAATACTATTCATCAACAAGGAACAAGTTA
CTGATAGTCTCAGAAGCATGAACAAACCTCAAAAATATATTAAGGAAAGAAGCCAGACGTCAAAGTGTAT
AGTCTGTATGAGTCCATTCATGTGAGTTTATAGAAAACACAATTTATGGTGAAAGAAACCAATAGCATTT
GACACTGGCCGTGGGAAGAGGGTAGCAGAGATTGATTGAGCAGCCACACAAGGGAGTTTCTGGGGTGGTG
AAAATGTTCTGCATTGTGAGGGCAGTGTGGGCTACACAAGTATATGTATTTATCAAATCTCATCCAGCTA
CATTTAAGATCTGTGCATCTCACTCTATGTGAAAATATACTCAACTGAAAAACAGAGCAGGTATCTGTTT
CAGGTGCTACATCACTTGATACGTCCAGTTGTGTTAAAAACCACTGCCTAACATCCTCAAATGGGGGATC
TGGGCTTGAGACTAGGTCACATGTGTAGAGTCTCTACAGAGACCGTGTTGGATTCCCATGCTCCATAATA
CGTTCCAAGTTTTCTCAGACAGCCACAGGTCATGAATGTGAGGATTCTGAGAGGTTGGAGCAACGTTCTT
GGGAGGCATAATGGGGAAGGCATTCTCCAAGATTCCTCCAGCCTGGGGTCTTCACCTGCTGTGCCTCTTA
CTGCATTGTTTTCTGACTCATCCATAGCCACTTGACCCCTTCAGATCCCATAGTCTACCTAGCCGTCTCC
CTTTATGCCTTGGGTCCCGCTGTTCTTTCAACTCATCACCCATTCCTTCAGTCCCAGAGTGGCTGCAGCC
AGCAGAGGATGGACTGAGAGCAGGAGAGGAGGTCGTGCCCATGAACCCATCCTAGAGAAGCAGCATCCTG
CCTGGGAGCTAGTTTTCCAGGGAAGCTTTTATAAGTCCTGTAGACCCAAACCCACTTGCTCTACCAGATA
CAGTATTTATAGTAATACTATTTTCATGATTATTTTATATTGCAAATGTAGAGCATTTATGCTACACTAT
GAGTAAATAGAGTAAGGGGGCTGGCATGGGAATTATATAATCTTGGATGCCACTTCTTCCTTGGGGAAAT
GTATTTGAGTTCCAACTTACATATTACTATATAGTCTTATAGAGAGAGAGACAAAGAGCTAGACAGACAG
AGATATCTTTGTATGTGCATTAAAAAATCTAAGATACATATTTCAAAATCTGTGTCATTTATTCTGGAGG
AAAGTATTTGGCAGAAGGTGAAAGGAAGATATTCTGATCCTTTCTTGTACAGACATGTATTATCTCAGTT
TTCATAGAGAGCATATACTACTTTTGATGTTTTAAAACAAAAATTATAATCTGTGATGTGTCCACAGTTG
TTTAAAAGTTGAAGCTGAAGACCATTTGTGCTTGTGGCAATATTATTGTGGTATAATGGGAATATTTCAA
AGGCACTTGTTAACACTTTGTTACAGCAAAATGTAGAGGGCGCTAAGTGCCCTTGAATATTCTCCCATCT
CTGGTGACCTGTGTTGTTTTGAAATTTGCAGTGGCCTGACCAGGAACTACTGCAGGAATCCAGATGCTGA
GATTCGCCCTTGGTGTTACACCATGGATCCCAGTGTCAGGTGGGAGTACTGCAACCTGACACGATGTCCA
GTGACAGAATCGAGTGTCCTCACAACTCCCACAGTGGCCCCGGTTCCAAGCACAGAGGCTCCTTCTGAAC
AAGGTAAGAAATTTGTGGTTAGACATCTATATACTGGGATGAAAAACCATGGAAAATCTTACTGATGCAG
AAGCCTTCAGTGGTACACTGGAGGGTTGGTTGAGGGTCTGCAATGTGGAGGAAAGCCTCAGCGCCCTCTC
TGGGGGATCCAGAACTGTGATTTTTGGCACGCTGTGAGGAGGCAGTGTCTTTAGGAAGGGCACGGTGTCT
TTAGGAAGGGCACAGACCCGCCAGGGCACTGGACTTACCACTCCCCTGGTTATTAAATGGGTCATTTCAG
TGTCCTAGCCAAAATGGATATTCTAACAGCCTGCCAAATATGTGAAGATTTCCAAGCCAATAAGCCTTTC
CAGTGATTTAAAGTAGACTTTTTTCATTGCAATCTACAGTTTGCAGTTTCTTAAGAACATGGCCTTTGAG
TATGATATCCTAGAGAAACCTAAGGAGACTGCATTATTTTTCTATTGTCCTGGGGCTGCATAGCAGGAGG
TAACCAACGAATGCTGTCTCTCCCTGGCCTATCTCAGTCTTTCACAGGCTCTGTTCACCTCAGCTTTGAA
GTTAGAAATTTCTAGGTGTTCTTGCCTCTTCTTCTCATGAAACCTGCATTGGCAGTGAGTCTACAGAAGA
AGAGGAAGAGAATTCTGCTTTGTTACAATTCAGGACTCTGGGCACTAGAAGATTCCCTATCTCTCCTCCA
AGGGAATAAGTTGTTTGTCTCTAACCCTCCTTGAGAAACAATGAGTCTTTGCCTGCACTCCTAAATGTAG
GATGATTTCCTGCCCAAATTTTCAAAAGATTAAGCCTTTTGCCTTGGTATGAGCAATGGTCTAGGGAAAT
GCGCAAGGGTCTTGTGTCGGCCCCTGACTGACCACCAGTCACCTCCTACAGCCTGCACCAAGGAATGCAT
TGCATTCTGGTCTTCTGCCCTGTGGTTCTCATGAAAACCAGCAGAGATTCATATGATGGAGCTGCACATG
AATGTAATTTCCAATGTCCAGCATTCTCCTCTGTTCTTTATCTTTAGATTTAAAAATAATGTTTCTATGA
ACTTATTAAAATTCTAGAATACTATGAATCTACTGGGTCTTTTCACATCCTTTTGCTACTAGTAGAAAAA
AGAATAGTAATAATTTTCAGAGGCTACTGTCCAGTATGTGACATAAATTGTCTCCCATGTTTCTCTGCTC
ATGCAATTACTGAGTATGATTTATTTTATTTTAATTTCAGCACCACCTGAGAAAAGCCCTGTGGTCCAGG
ATTGCTACCATGGTGATGGACGGAGTTATCGAGGCATATCCTCCACCACTGTCACAGGAAGGACCTGTCA
ATCTTGGTCATCTATGATACCACACTGGCATCAGAGGACCCCAGAAAACTACCCAAATGCGTATGTATTT
GATTAAAACCATAAGAGGAGCAACAGCCAACTCAAATATTGGTTAGAAGACCCATGCTTTAAGCTCACTT
CCTAGGGACAAATTTCTCTTAGACTCACATTTTGGCAAAATGTCTCAGGACCTTTGCTTTTGAGCAAAGA
GTCTAAGAGAAGAGAAATTTTAGGCCTGCTATTTTTCCTAATAGTTTTATGGAAGGAGTAGAATATACGG
AAGTGGCGAAGTCATATTAATGTAAAGCTCAGAAGATAAATGACCAAAGCTTAAACACAGCACCATTCCA
CAATGCCCACTAAAAATCAATGTCATCTTTCACTCGTGCAATTCTGTCATTCTAAATTTCAATTCCCGAA
GGTTTGTTTGCCATTTTTGTCATGGGTAATAAGTAAAAAAAAAAAAATTAAGATGTGTATATATATATAT
ATATATATATATATACACACACACACACACACACAAACATCTGAATATTTATATATATGTCTGAATATTT
ATATACTTGTGTATAAAACTTATATTTAAATTTTTGCATAAATTTATATATTTTTAATATTTCATTAAAA
ATTATATTGTTTCACTATGTATGTCTGAGTATTTTTATATATTTTAATATAACATTTTAAATATTTATAT
ATAAATATTCAGGTATGTAACTGAATATTCATTTACACACACAAATATATGTGTGCATGTGTGTATATAT
ATATATACCCATATATATATATATATATATATATACATATATATATATATATATATATGTATATATATAT
ATATATATATATATACACACACACACACACACACATACATACAGGTATAAACACACTGGGCCTGAAGCAC
CAGTGGTCTGAAAGGACATGTGTTGCCAGGACTTGAAGAGCAAAAGCAGGAAGGCGGATGAGAGTCAGGA
GGTACACAAACGCTGAAAAGTAAAATGGACAAGTACATGGACAAAAAGCAGGTATAAGCATAACAGCCTT
TTGGAAGTAAATGACTATAAAATATATGAAAATACTGTTTTCACAAGTTGCACAACAGATAGTAGTGTAT
TGAGATAATTTAGAACAGAAAACAAATGTGATCAACCCCATAAGTGTGCTGTATTTCATCATGGATTGAA
GGAAAAAGAGATGGAGCCCAAGAAGACCACAGCAGTCTTGATGAACTGAGAGACACCAGAGTTTGGGATT
ACAAAGGCAGCTGGGATTTTCTACACTTGGTAATAATGAGAAAGAATTTGTGGAGATAAAGAGCTACAGT
CATGTACCTAGAAGTCACCTCAGTGTAATATAAATCTGCATATGCACAGGGAGTGATTCCACAATGAAAG
TAGGACAAAGAACAGCTACTGGGGAAAGAATAACTACAAGGGAACAATGAGTTCAATGGAGATGGCAGAG
CTCACAAAGCACTGGGGGATATTTGAGTTCTTACCAGCTAGAAAAGAGACCTCATTGCAAATCTTGGGCA
TTCAGTAGAGACCCCAGAAAAGCCACTCTTTGGAAACAGAGTTGATGTATTTTAAGAGCAAAATCTACTC
CACAAAAATCCTAGCAAAATTGAAAAGCAAGTCAGAAAGACCAAAATCCTCTCAACATAAATTAGTTGCC
CATCAGAAGAAAGCTTAACCTCTTCATAGGTAAACAATAAAATCAAATTGCTCAGTTATCTGGCATCCAC
AATATGTGACATAAATTTAAAAATTTACTAGACATACAAGAAGCATTTAGTGTGATCCATAACCAGGAGA
AAAATCATTCAATACAAATAGACCCAGAAATGACAGAAATGATAGAATTAGCAAAAACATTTAAAATATA
CATATGATCATTTGATCTTGTGATCAGATATCACAAGAGAAGAAAGAGATACTTGAACAGAAAAAATGCC
TGAAGCAATGATGGCTGAAAACTTTCCAAATATGAAGAAAAAAAAGCTCACAGATTCAAGAAAACTAATC
AATCAGAAATATGATTTTGAAAAGTAAAAATGTATGATTTACTTTGGCAAATCTTCTTGGTTAAATTGTC
TAAAATCAAAGAAAGCTAGGAAAATTTTATAAGCCAGAGGAAAAAAGATTGTTTATATAAAGGAACAGTT
ACACAAATGACTGATGCCTTCTCATCAGAAACAATGAAAGTCAGAAACAATAAAGTAACATCTTTAAAGT
AATAGAAGAAAAACCCAAGAGGTGAGGGATCGTGGCAGACAGGAGGCAGGACTAGATTGCAGCTCTGGAC
AGAGCAGCATGCAGAGGCTCATATTGTGAATTTTAGCCCCATATTGACTGCAAGAACAGACCAGCAATCC
TGAGAGGACCCACAGACCGTGTGAAGGAAGCAGACTGCTCCTGCAGGATAAGGGAGACACCCCAAATACT
GTGAGTTCCCCAACTGCAGAAGTGGAAAAGGGAGGCCTTACTCCCTCAAACACACCCCACAACTGGAGAA
GCTGAAAGTCTGTTTGCAGGAGAAGTTCCCAACTTTACCTGGGCCTCAGTAAATTTAGAGAGCTGAGCCA
AGCAAAATATAGGGGTAGAGGAAGCAGCAGAGAAGACCTCAGAGCTTGCTGGATCCCCAAGCAGCTCATT
CCTGCCTGGCACCACAGAGATCCATCAGAAGTGTGGCCAAAGGAACAGAGGGTAAAACTCCACATGGAGG
ACTGCTCTACCTGAACTTTCTAACAATTTGAACAGGGGGAGAAGCCTCCTGGCCAGAACTTGGGGGAGGG
CATGAATCTGGTTTGCAGACTTCACAGGTGGGGGAAGGACTAAAGCCCTTTTCTTTCACAGCTGGGAGGT
GGAAAGCCTCAGGCAAGTTTTCAAGCCTGACTTTCCCCCCACCTGGAAACAGACTTGGAGCTGTTGCGGG
GTTGGGGGCATGGTGGGAGTAAGACCAGCCCTTCAGTTTGCATGGGTGCTGGGTGAGGCCTGTGACTGAC
AGCTTCCCTCCACTTCCCCGACAACTCAGATGACTCAGCAGAGGCAGCCATAATCCTCCTAGGTACACAA
CTCCAGTGACCTGGGAACTTCACCCCCACACCATACAGAAGCTTCAGTAAGACGTGCCCAAGGAAAGTCT
GAGCTCAGACACGCCTAGTCCCACCCCCAACTGATGGTCCTTCCCTACCCACCCTGGTAGCAGAAGACAA
AGAGCATATAATCTTTGGAGTTCTAGGGCCCACCCACCTCTAGTCCCTCTCCACACTAGTATAGCTGATG
CAGGAGGCCAACCAGCACAAAAATAGAGCATTAAACCACCAAAGCTAGGAACCCCTATGGAGTCCATTGC
ACCCTCCTCCACCTCCACCAGAACAGGCACTGGTATCCACAGCTGAGAGACCCATAGATGGTTCACATCA
CAGGACTCTGTACAGACAGTCCCCAGTACCAGCCCAGAGCTGGGTAGACTTGCTAGGTGGCAAGACCCAG
AAGACAGGCAATAATCACTGCAGTTCAGCTCACAGGAAGCCACATCCATAGGAAAAGAGGGAGAGTACTA
CATCAAGGGAACACCCCATGGGATAAAAACATCTGAACAACAGCCTTCAGCCCTACCTTCCCTCTGACAC
AGTCTACCCAAATGAGAAGGAACCAGAAAACCAACCCTGGTAATATGACAAAACAAGGCTCATCACACTC
CCAGTTCACCAGCAATGGATCCAAACCAAGAAGAAATCCCTGATTTACCTGAAAGAGAATTCAGGAGGTT
AGTTATTAAGCTAATCAGGGAGGGACCAGAGAAAGGCAAAGCCCAATGCAAGGAAATCCAAAAAAAAAAA
GGTATAAGAAGTAAAAGGTGAAATATTCAACAAAATAGATAGCTTAATAAAAAAACAATAAAAAATTCAG
TAGACTTTGGACACACCTTTGGAAATGTGACATGCTCTGGAAAGTCTCAGCAATAGAACTGAACAAGTAG
AAAAAATAAATTCAGAGCTCAAAGACAAGGACTTCAAATTAACCCAATCCAACAAAGACAAAGAATAAAG
GATAAGAAAATATGAACAAAGCCTTCAAGATGTCTGGGATTATGTTAAATGACCAAATATAAGAATAATC
GTGGCTCCTGAGGAAAAAGACAATACTAAAAGCTTGGAAAACATATTTGGGGGAATAACTGGGGAAAACT
TACCTGGCCTTGCTGGACACCTAGACATGCAAATACAAGAAACACAAAGAACATGTAAATACAAGCAGCA
CAAAGAACACCTGGGAAATTCATCACAAAAAGATCTTAGCCTAGGCACATTCTCATCAGGTTATGCAAAG
TTAAGACGAAGGCAAGAATCTTAAGAGCTGTGAGACAGAAGCACCAGGTAATGTATAAAGGAAACCCTAT
CAGATTAACAGCCAGTTTTTCAGCAGGAACTGTACAAGCTATAAAGGATTGGAGCCCTATCATAGCCTCC
TCAAACAAAACAATTATCAGTCAAGAATTTTGTATCCAGCGAAAGTAAGCATCATATATGAAGGAAAGAT
ACAGTCGTTTTTGGACAAACAAATGCTAAGAGAATTCACCATTACCAAGTCACCACTAGAAGAACTGCTA
AAAGGAGCTCTAAATCTTGAAACAAATCCTAGAAACACATGAAAACAGAATCTCTTTAAAGCATAAATCA
CACAGGACCTATAAAACAAAAGTACAAGTTAAAAAACAAAAACAAAAAACAAAACCAAAGTACGGAGGCA
ATAAAGAATATGATGAATGCAGTGGCACCTCACATTTCAATGCTAAAATTGAATCTAAATGGCCTAAATG
CTCCACTTAAAGGATACAAAAAGAGTTGGTGGCTGGCAAGATGGCTGAATAGGAACAGCTCCAGTCTGCC
GCTCCCCGTGAGATCAACACATAGGGTGGGTCATTTCTGCATTTCCAACCAAGGTACCCGGCTCATCTCA
TTGGGACTGGTTAGACAGTGGGTGCAGCCCACAGAGGGTGACCTGAAGCAGGGTGGGGTGTCACCTCACC
TGGGAAGTGGAAGGGGTCAGGGAACTCCCTCCCCTAGCCAAAGGAAGCCGTGAGGGACTGTGCCGTGAAG
ACCAGTGCATTCTGGCACAAATACTATGCTTTTCCCACGGTCTTTGCAACCTGAAGACCAGGAGATTCCC
TTGGGTGCCTACACCACCAGGGCCCTGGATTTCAAGCCCAAAACTGGGCTGGCATTTGGGCAGACACTAA
GCTAGCTGCAGGAGTTTTTTTTCATACCCCAGTGGTCCCTGGAATGCCAGCAAGACAGAACCATTCACCC
CCGTGAAGAAAGGGCTGAAGCCAGGGAGCTAAGTGGTCTTTCTCAGTGGATCCCACCCCCATGGAGCCCA
GCAAGCTAAGCTCCACTGGCTTGAAATTCTTGCTGCCAGCACAGCAGTCTGAAGTTGACCTGGGACGCTC
AAGCTTGGTGGGAGGAGGGGTATCCACAAATACTGGGGCTTGAGTAGGAGGTTTTCCCCTCACAGTGTAA
GCAAAACCGCTAGGAAGTTTGAACTGGGCAGGGTGCACTGCAGCTTGGCAAAGCCATTGTAGCAAGAGTG
CCTCTCTAGATTCCTCCTCTCTGGGCAGGGCATCTCTGAAAGAAAGGCAGCAGCCCCAGTCAGAAGCTTA
TAGATAAAACTCCCATCTCCCTGGGACAGAGCAACTGGAGGAAGGGGTGGCTGTGAGTGCAGCTCCAGCA
GACTTAGTTTCCTGCCTGCCAGCTCTGAAAAGAGCACCAGATCCCCCAACACAGCACTAGAGCTCTGATA
AGGGACAGACTGCCTCCTCAAGTGGGTCCTGGTTTCAGAAGATAATAAGAAACTCCTCTGAGCTAAAGGA
GCATGTTCTAACACAATGCAAGGAAGCTAAGAACCTTGAAAAAGGTCAGAGGAATTGCTAACTACAGTAA
GCAGTTTAGAGAAGAACATAAATGACCTTAGGGAGCTGAAAAACACAGCACGAGAACTTCATGACACATA
CACAAGTATCAATAGCAAAATCGATCAAGTGGAAGAAAGGATATCAGAGATTGAAAATCAACTTAATGAA
GTAAAGCGTGAAAACAAGATTAAGGAATAAAGAATGAAAAGGAATGAACAAATCCTCCAAGTATGGGACT
ATGTGAAAAGATTGAACCTACGTTTGATTGGTGTACCTGAAAGTGATGGGAGAATGGAACCAAGTTGGAA
AACACTCTTCAGGATATTATCCAGGAGAACTTCCCCAACCTAGCAAGACAGGCCAACATTCAAATTAAGG
AAATACAGAGAATACCACATTCAAATTCAGGAAATACAGAGAACACCACAAAGATACTCCTCAAGAAGAG
CAACCTGAAGACACATAATCGTCAGATTCACCAAGGTTGAAATGAAGGAAAAAAATGTTGAGGGCAGCCA
GAGAGAAAGTTTGGGTTACCCACAAAGGGAACCCCATCAGACTAACAGTGGATCTTCCTGCAGAAACTCT
ACAAGCCAGAAGAGAGTGGGAGGCCAATATTCAACATTCTTTTTTACTATTATTATACTTTAAGTTCTAG
GGTACATGTGCACAAGGTGCAGGTTTGTTACATATGTATACATGTGCCATGTTGGTGTGCTGCACCCATT
AACTCTTCATTTACATTAGGTATATCTCCTAATACTATCCCTCCCCACTCCCCCCATCCCATGACAGGCC
CCGGTGTGTGATGTTCCCCACTCTGTGTCCATGTACTCTCATTGTTCAATTCCCACCTATGAGTGAGAAC
ATTCGGTGTTTGGATTTCTGTCCTTGTGATAGTTTGCTGAGAATGATGGTTTCCAGCTTCATCCACATCC
CTACAAAGGACATGAAGTCATCCTTCTTTATGGCTGCATAGTATTCCATGGTGTATATGTGCCACATTTT
CTTAATCCAGTCTACCATTGATGGACGTTTGTGTTGGTTCCAAGTCTTTGCTATTGTGAATAGTGCCGCA
ATAAACATATGTGTGCATGTGTCTTTATAGCAGCATGATTTATAATCCTTTAGATATATATCCAGTAATT
GTATGGCTGTGTCAAATGGTATTTCTAGTTCTAAATCCTTGAGGAATCACCGCACTGTCTTCCACAATGG
TTGAACTAGTTTACAGTCCCACCACCAGTGTAAAAATGTTCCTATTTCTCCACATCCTCTCTAGCATCTG
TTGTTTCCTGACTTTTTAATGATCACCATTCTAACTGGTATGAGATGGTATCTCATTGTGGTTTTGATTT
GCATTTCTCTGATGGCCAGTGATGGTGAGCACTTTTTCATGTGTCTCTTGACTGCATAAAAGTTTTCTTT
TGAGAATTGTCTGTTAATATCCTTTGCCAACTTTTTGATGGGGTTGTTTGATTTTTTTTCTTGTAAATTT
GTTTATGTTCTTTGTAGATTCTGGATATTAGCCCTTTGTCAGATGGGTAGATTGTAAAAATTTTCTCCCA
TTCTGTAGCTTGCCTGTTCATTCTGAGGGTAGTTTCTTTTGCTGTGCAGAAGCTCTTTAGTTTAATTAGA
TCCCATTGGTCAATTTTGGCTTTTGTTGCTATTGCTTTTGGTGATTTAGTCATGAAGTCCTTGCCCATGC
CTATGTCCTGAATGGTATTGCTTAGGTTTTCTTCTAGGGTTTATATGGTTTTAGGTCTAACATTTAAGTC
TTTAATCCATCTTGAATTAATTTTTATATAAGGTGTAAGGAAGGGATCCAGTTTCAGCTTTCTACATATG
GCTAGGCAGTTTTCCCAGCACCATGTATTAAATAGGGAAACCTTTCCCTATTTCTTGTTTTTGTCAGGTT
TGTCATAGATCAGATGGTTGTAGATGTGTGGTATTATTTCTGAGGGCTCTGTTCTGTTCCATTGGTCTAT
ATCTCTGTTTTGGTACCAGTACCATGCTGTTTTGGTTACTGTAGCCTTGTAATGTAGTTTGAAGTCAGGC
AGAGTGATGCCTCCAGCTTTGCTTTTTTGGCTTAGGATTGTCTTGGCAATGCATGCTCTTTTTTGTTCCA
TATGAACTTTAAAGTAGTTTTTTCCAATTCTGTGAAGAAAGTCATTGGTAGCTTGATGGGGATGGCATTG
AATCTATAAATTACCTTAGGCAGTATGGCCATTTTCACAATATTGATTCTTCCTATCCATGAGCATGGAA
TGTTCTTCCATTTGTTTGTGTCCTCTTTTATTTCATTAAGCAGTGGTTTGTAGTTCTCCTTGAAGAGGTC
CTTCCCATCCCTTGTAAGTTGGATTCCTAGGTATTTTATTCTCTTTGAAGCAATTGTGAATGGGAGTTCA
TCCATGTCCCTACAAAGGACATGAAGTCATGTATGGGAATGCTTGTGATTTTTGCACATTGATTTTGTAT
CTTGAGACTTTGCTGAAGTTGCTTATCAGCTTAAGGAGATTTTGGTCTGAGAAGATGGGGTTTTCTAAAT
ATACAATCATGTCATCTGCAAACAGGGACAATTTAACTTCCTCTTTTCCTAACTGAATACCCTTTATTTC
CTTCTCCTGCCTAATTGCCCTGGCCAGAACTTCCAACACTATGTTGAATAGGAGTGGTGAGAGAGGGCAT
CCCTGTCTTGTGCCAGTTTTCAAAGGGAATGCTTCCAGTTTTTGCCCATTCAGTATGATATTGGCTATGG
GTTTGTCATAAATAGCTCTTATTATTTTGAGATATGTCCCATCAATACATAGTTTATTGAGAGTTCAGCA
TGGAGAGCTGTTGAATTTTGTCAAAGGCCTTTTCTGCATCTATTGAGATAATCATGTGGTTTTTGTCTTT
GGTTCTGTTTATATGATGGATTACATTTATTGATTTGCATATGTTGAACCAGCCTTGCATCCCAGGGATA
AAGCCAACTTGATCATGGTGGATAAGCTTTTTGATGTGCTGCTGGATTCGGTTTGCCAGTATTTTATTGA
GGATTTTTGCATCAATGTTCATCATGGATGTTGGTCTAAAATTCTCATTTTTGTTGTGTCTCTGCCAGGA
TTTGGTATCAGGATGATGCTGGCCTCATAAAATGAGTTAGGGAGGATTCCCTCTTTTTCTATGATTGGAA
TAGTTTCAGAAGAATTGGTACCAGCTCCTCTTTGTATCTGTGGTAGAATTCGGCTATGAATCTCTCCTGG
ACTTTTTTTGGTTGGTAGGCTCTTAATTATTGCCTCAATTTCAGAGCCTGTTATTGGTCTATTCAAGGAT
TCAATTTCTTTCTGGTTTAGTCTTGGTAGGGTGTATGTGTCCAGGAATTTTTCCATTTCTTCTAGATTTT
CTAGTTTATTTGCACAGAGGTGTTTATAATATTCTCTGATGGTAGTTTGTATTTCTGTGGGATTGGTAGT
GATATCCCCTTTATCATTTTTTATTGCATCTATTTGATTCTTCTCTCTTTTCTTCTTTATTAGTCTTGCT
AGTGGTCTATCAATTTTGTTGATCTTTTCAAAAAACCAGCTCCTGGATTCATTGATGTTTTGAAGGTTTT
TTTGTGTCTCTATCTCCTTCAGTTCTGCTCTGGTCTTAGTTATTTCTTGCCTTCTGCTAGCTTTTTAATG
TGTTTGCTCTTGCTTCTCTAGTTCTTTTAATGGTGATGTTAGGGTGTCAATTTTAGATCTTTCCTGCTTT
CTCTTGTGGGCATTTAGTGCTGTAAATCTCCCCCTACACACTGCTTTAAATGTGTCCCAGAGATTCTGGT
ATGTTGTGTCTTTGTTGTCATTGGTTTCAAAGAATATCTTTATTTCTGCCTTCATTTCGTTACATACCCA
GTAGTCACTCAGGTGCAGGTTGTTCAGTTTCCATATAGTTGAGCAGTTTTTAATGAGTTTCTTAATCCTG
AGTCCTAGTTTGATTGCACTGTGGTCTGAGAGACAGTTTGTTATAATTTCTGTTCTTTTACATTTGCTGA
GGAATGCCTCACTTCCAACTATCTGGTCAATTTCAGAATAAGTGCGATGTGGTGCTGAGAAGAATGTATA
TTCTGTTGATTTGGGGTGGAGAGTTCTGTAGATGTCTATTAGGTCTGCTTGGTGCAGAGCTGAGTTCAAT
TCCTGGATATCCATGTTAACTTTCTGTCTCATTGATCTGTCTAATGTTGACAGTGGGGTGTTAAAGTCTC
CCATTATTATTGTGTGGGAGTCTAAGTCTCTTTGTAGGTCTCTAAGGACTTGCTTTATGAATCTAGGTGC
TCCTGTATTGGGTGCATATATATTTAGGATAGTTAGCTCTTCTTGTTAAATTGGTCCCTTTACCATTATG
TAATGGCCTTCTTTGTCTCTTTTGATCTTTGTTAGTTTAAAGTCTGTTTTATCAGAGACTAGGATTGCAA
CCCCTGCTTTTTTTGTTGTTTTCCATTTGCTTGGTAGATCTTCCTCCATCCCTTTATTTTGAGCCTATGT
GTGTCTCTGCACGTGAGATGTGTCTTCAGAATACAGCACACTGATGGATCTTGACTCTTTATCCAATTTT
CCAGTCTGTGTCTTTTAATTGGAGCATTTAGCCCATTTACATTTAAGGTTAATATTTTTATGTGTGAATT
TGATCCTGTCATCATGATGTTCGCTGGTTATTTTGCTCATTAGTTGATGCAGTTTCTTCCTAGCATCGAT
GGTTTTTACAATTTGGCATGTTTGTGCAGTGGCTGATACCGATTGTTTCTTTCCATGTTTAGTGCTTCCT
TCAGGAGCTCTTGTAAGGCAGGCCTGGTGGTGACAAAATCTCTCAGCATTTGCTTGTCTGTAAAGGATTT
TATTTCTCCTTCACTTATGAAGCTTAGTTTGGCTGGATATGATATTCTCAGTTGAAAATTCTTTTCTTTA
AGAATGTTGAATATTGGCTGCCACTCTCTTCTGGCTTGTAGAGTTTCTGCTGAGAGATCTGCTGTTAGTC
TGATGGGCTTCCCTTTGTGGGTAACCCGACCTTTCTGGTGAATCTGACAATTATGTGTCTTGGAGTTACT
CTTCTCGAGGAGTATTTTTGTGGCATTCTCTGTATTTCCTGAATTTGAATGTTGGCCTGCCTTTGTAGGT
TGGGGAAGTTCTCCTGGATAATATCCTGAAGAGTGTTTTCCAACTTGGTTCCATTCTCCTCGTCACTTTC
AGGTACACCAAGCAGATGTAGATTTGGTCTTTTCACATAGTCCCATATTTATTGGAGGCTTTGTTCATTT
CTTTTTACTCCTTTTTTTCTCTAAACTTCTCTTCTCGCTTCATTTCATTCATTTGATCTTTAATCACTGA
TACCCTTTCTTCCACTTGATTGAATCAACTACTGAAACTTGTTCATGTGTCACGTAGTTCTCGTGCCATG
GTTTTCAGCTCCATTAGATCATTTAAGGTCTTCTCTATGCTGTTTATTTTAGTCTGCCATTCATCTAAAC
TTTTTCAAGGTTTTTAGCTTCTTTGCAATGGGTTCGAACATCCTTCTTTAGCTCGGAGAAATTTGTTATT
ACAGATCGTCTGAAGCCTTCTTCTCTCAACTCATCAAAGTCATTCTCTGTCCAGCTTTGTTCTGTTGCTC
GTGAGGAGCTGCGTTCCTTCGGAGGAGAAGAGGCACCCTGATTTTTAGAATTTTCAGCTGTTCTGCTCTG
GTTTCTCCCCATCTTTGTGGTTTATCTACCTTTGGTTCTTGATGATGGTGATGTACAGATGGGGTTTTGG
TGTGGATGTCTTTTCTGTTTGTTAGTTTTCCTTCTAACAGTCAGGACCCTCAGCTGCAGGTCTGTTGGAG
TTTGCTGGAGGTCCACTCCAGTCCCTGTTTGCCTGGGTATTACCAGTGGAGGCTGCAGAACAGCAAATAT
TACAGAACAGCAAATGTTGCTGCCTGATTCTTCCTCTGGAAGCTTCATCTCAGAGGGGCACCCAGCTGTA
TGAGGTGTCAGTTGGCCCCTACTGGGAGGTGTCCCCCAGTTAGGCTACTCGGGGGTCACGGACCCACTTG
AGGAGGCAGTCTGTCCATTCTCAGATCTCAAACTCTCTGCTGGGAGAACCACTACTCTCTTCAAAGCTGT
CAGACAGGGATGTTTAAGTCTGCAGAAGTTTCTGCTGCCTTTTGTTCAGCTATGCCCTGCCCCCAGAGGT
GGAGTCTACAGAGGCAGGCAGGTCTCCTTGAGCTGTGGTGGGCTCCACCCAGTTTGAGCTTCCTGGTCGC
TTTGTTTACCTACTCAAGTCTCAGCAATGGCAGACGCCCCTCCCCCAGCTTTGCTGCCGCCTTGCAGTTC
GGTCTCAGACTACTGTGCTAGCAGTTCAATCTCAGACTGCTGTACTAGCAGTGAGCAAGGCTCTGTGGGC
ATGGGACCCTCTGAGCCATGTGCAGGATATAATCTCCTGGTGTGCCGTTTGCTAAGACCATTGGAAAAGT
GCAATATTAGGGTGGGAGTGTCCCGATTTTCCGGGTACATCTGTCATGGCTTCCCTTGGCTAGGAAAGGG
AATTCCCTGACCCCTTACACTTCCCGGGTGAGGCAATATCCCGCCTTGCTTCGGCTCACTCTCCGTGGGC
TGCACCCACTGTCTGACAAGCCCCGGTGAGATGAACCCAGTACCTCAGCTGGAAATGCAGAAACCACCCA
TCTTCTGCTTTGCTCATGCTGGGAACTGTGGACTGGAGCTGTTCCTATTCGGCCATCTTGAAACCTCCCC
TCTCTCACGATCACAAGGTCCCACAATAGGCCGTCTGCAGGCTGAGGAGCAAGAAAAGCCAGTCTGAATT
CCAAAACTGAAGAAATTGGAGTCTGATGTTCAAGGGCAGGAAACATCCAGTGCCAAAGAAAGATGTAGAA
TATTCAACATTCTTAAAGAAAATAATTTTCAACCTAGAATTTCATATCCAGCCAAACTAAGCTTTATAAC
AAAGGAGAAGTAAAATCCTTTACAAACAAGCAAATGCTGAGGAATTTTGTCAACACCAGGCCTGCCTTAC
AAGAGGTCCTGAAGAAAACACTAAATATGGAAAGGAAAAACCAGTAACAGCTACTGCAAAAACATACCAA
ATTGTAAACACCATCAACACTATAAAGAAACTGCATCAACTAATGGGCAAAATAGCCAGCTAGCATCATA
ATGACAGGATCAAATTCACACATAACAATATTAACCTTAAATGTAAATGGGCTAAATGCCCCAATTAAAA
GACACAGACTGGGAAATTGAATAAAGAGTCAAGACCCATTGGTTTGCTGTGTTCAGAAGACCCATCTCAG
GGTGAAAAGACATACATGGGCTCAAAATAAAGAAATGAAGGAATATTTACCAAGCAAATGGAAAGAAAAA
AAAAGCAGCGGTTGCAATCTTAGTCTTTGATGAAACAGACTTTAAACCATCAAAGATCAAAAGAGACAAA
GGAGGGCATTACCTAATGGTAAAAGTATCAATGCAACAAGAAGATCTGACTGTCCTACTTATATATGCAC
CCAATACAGGAGCACCCAGATTAATAAAGCAAGTTCTTAGAGACCTACAAAGAGACTTAGACTTCCACAC
AAAAATAGTGGGAGACTTTAACACCCCACAGCCAATATTAGATCGACGTGACAGAAAATTAACAAGGATA
TTCAGGACGTGAATTCAGCTCTGGACCAAGCTGACCTAATAGACATCTACAGAACTCGACACCACAAATC
AACAGAATATACATTCTTCTCAGCACCACATTGCACTTATTCTAAAATTGACCACATAATTGGAAGTAAA
ACACTTCTCAGCAAATGCCGTAGAATGGAAATCATAACAAACAGTCTCTCAGACCAAAGTGCAATCAAAC
TAGAACTCAGGATTAATAAACTCACTCAAAACCACACAACTATATGGAAACTGAACAACCTGCTCCTGAA
TTACTACTGGGTAAATAACAAAATTAAGGCAGAAGTAGATAAGTTCTTAGAAACCAAAGAGAACAAAGAC
ACAATGTGCCAGAATCTCTGGTACACAGCTAAAGCCATGTTTAGAGGGAAATTTATAGCACTAAATGCCC
ACAGGAGAAAGCGGGAAAGATCTAAAATCAACACCCTAACATCACAATTCAAAGAACCAGAGAAGCAAGA
GCAAACAAATACAAAAGCTAGCAGAAGACAAGAAATAACTAAGATCAGAGCAGAACTGAAGGGGATAAAG
ACACGAAAACCCTTTAAAAAATTAATAAATCCAAGAGCTGGTTTTTTGAAAAGATTAACAAAATACATAG
AAGCCTAGCCAGACTAATAAAGAAGAAAATAGAGAAGAATCAAATAGACACAATAAAGAATAATAAAGGG
GATATCACCAATGATGCCACAGAAATACAAACTACCATCAGAGAATACTTTAAACACCTCTATGCAAATA
AAATAGAAAATCTAAAAGAAATGGATAAATTCCTGGACACATACACCCTCCCAAGACTAAACCAGGAAGA
AGTCAAATCCCTGAATAGACCAATAACAAGTTCTGAAATCGAGGCAGTAATTAATAGCTTACCAACCAAA
AAAAGCCCAGACCAGAGGGATTAACAGTCAAATCCTAACAGAGGTACAAAGAAGAGCTAGTACTATTCCT
TCTGAAACTATTCCACACAATAGAAAAAGAGGGACTCCTGCCTAACTCATTTTATGAGGCCAGCATCATT
CTGATACCAAAACCTGGCAGAGACACAACAAGAAAAGAAAATTTCAGGCCAACATCCCTGATGAACATCA
ATGTGAAAATCCTCAATAAAATACTGGCAAACTGAATCCAGCAGCACATCAAAAAGCTTATCCACCATGA
TCAAGTTGGCTTCATCCCTGGGATGCAAGGCTGGTTCAACATATTCAAATCAATAAACATAATCCATCAC
ATAAACAGAACCAATGACAAAAACCGTATGATTATCGCAATAGACGCAGAAAAGGCCTTTGATAAAATTC
AATACCCAATCATGCTAAAAACTCTTAATAAACTAGGTATTGATGGAGCATGTCTCAAAATAATAAGAGC
TACTTATGACAAATGCATAGCCAATATCATACTGAATGAGCAGAAGCTGGAAGCATTCCCTTTGAAAACC
AGCACAAGACAAGGATGCCCTCTCTCACCACTCCTATTCAACATAGTATTGGAAATTCTGTCCAGGGCAA
TCAGGCAAGAGAAAGAAATAAAGGTATTCAAGTGGGAAGAGAGGGAGTCAAATTATTTCTCTTTGCAGAT
GACATGATTGTATATTTAGAAAACTCTATCATCTCAGCCCAAAATCTCCTTAAGCTGATAAGCAACTTCA
GCAAAGTCTCAGGATACAAAATCAATGTGCAAAAATCACAAGCATTCCTATACACCAATAAGAGACACAG
AGCCAAATCCTGAGTGAATTCCCATTCACAATTGCTACAAAGAGAATAAAATATACCTAGGAATCCAACT
TACAAGGGATGTGAAGGACCTCTTCAAGGAGAACTACAAACCACTGCTCAAGGAAATAAGATAGGACACA
AACAAATGGAAAAACATTCCATGCTAATGGATTGGAAGAATCAATATTGTGAAAATTGCCATACTGCCCA
AAGTGATTTATAGATTCAATGTTATCCCCATCAAGCTACCATTGATTTCTTCACATAATTAGAAAAAACT
ACTTTCAATTTCATATGGAATAGAAAAAGGGCCTGTATATCCAAGACAACCTAAGCAAAAAGAACAAAGC
TGGAGGCATCATGCTATCTGACTTCAAAATATACTACAAGGCTACAGTAACAAAAACAGCATGGTATGGT
ACTGGTACCAAAACAGATATATAGACCAATAGAACAGAACAGAGGCCTCAGAAATAACACCACACATCTA
CAACTATTGGATCTTTGACAAACTGGACAAAAATAAGCAATGGGGAAAGGATTCCCTATTTAATAAATGG
TGTTGGGAAAACTGGCTAGCCATATGCAGAAAACTGAAACTGGATCCCTTCCTTACACCTTATACACAAA
TTAACTCAAGATAGATTAAAGAATTAAATGTAAGACCTAAAACCATAAAAACCCTAGAAGACACTTTGGG
AGGCCGAGGTGGATGGATCACGAGGTCAGGAGATCGAGACCATCTTGGCTAACACAGTGAAAGCCCATCT
CTACTAAAAATACAAAAAATTAGCTGGGTGTGGTCGTGGGCACCTGTAGTCCCAGCTACTTGGGAGGCTG
AGGCAGGAGAATGGCATGAGCTGAGGAGGTTGAGCTTGCAGCAAGCCAAGATTGTGCCACTGCACTCCAG
CCTGGGCAACAGAGTGAGACTCCATCAAAAAAACAAAAACAAAAACAAAAAATCAAACCCTAGAAGAAAA
CATAGGCAATACCATTCAGGACATAGGCATGGGAGAAGACTTCATGACTAAAACAGCAAAACCAATGGCA
ACAAAAGCCAAAATTTACAAATCAGATCTAATTAAAATAAAGAGCTTCTGCACAGCAAAAAACTCTCATC
AGAGTGAAAAAGCAACCTATGGAGAAAAATTCTGTGGTCTAGCCATCTGACAAAGGGCTAATGTTTAGAA
TGTACAAGCAACTTAAACAAATGTACAAGAAAAAAAAAACAACCCCATCAAAAAGTGGGCAAAGGATATG
AACAGACACTTCTGACAGGAAGACCTTTATGTGGCTGACAAACATGAAAAAAGCTCATCATCACTGTTAA
TTAGAGAAATGCAAATCGAAACCACAATGAGATACCATCTCATGCCCGTTAGAATGGCGATCATTAAAAA
GTCAGGAAACAACAGATGCTGAAGAGGATGTGTGGAGAAAGAGGAACACATTTACACTGTTGGTGGGAGT
GTAAATTAGTTCAACCATTGTGGAAGACAGTGCGGTGATTCCTCAAGGATCTAGAACCAGAAGTACCATT
TGACCCAGCAATCCCATTACTGGGTATATACCCAAAGGATTATAAATCATTCTACAATAAAGACACATGC
ACACGTATGTTTATTGTAGCACTATTCACAATAGCAAAGACTTGGAACCAACTGAAATGCCCATCAATGA
TAGACTGGATAAAGAAAATGTGGCACATATACACTGTGGAATACTATGCAGCCATAAAACAGGATGAGTT
CATGTCTTTTGCAGGGACATGGATGAAGCTGGAAACCATCATTCTCAGCAAACTAACACAAGAACAGAAA
ACCAAACACCATATGTTCTCACTCATAAGTGTGAGTTGAACAATGAGAACACATGGACACAGGAAGGGGA
ACATCACACACAGGGGCCTGTTGGGGAGTTGAGGCTAGGGGAGGGATTGGATTAGGAGAAATACCTAATG
TAGATGATGGGTTGCTGGGTGCAGCAAACCACCATGACACGTGTATACCTATGTAACAAACCCACACATT
CTACACATGTATCTCAGAACTTAAAGTATAATAATAATAAGATACAGAACTGCAGAATGAATAAGAACTC
ACCAACCATCTGCTGCCTTCAGGAGACTCATTTAAGACATAAGGACTCACATAAACTTAAAGTAAATGGG
TGGAAATAATAATAAGTGGTGTCACTGATGTGGAGGTAGATTATAAAACTCTTATCATATGCTGGTGGAA
GATCAAAATGATAAAACGAATTAAAAAATCAGTCAGATGGTTTCTTAAAAAGTTCCATCAATATGCCTCT
ATCTTACAAACCTGCAATTCTATTCCTGAATCTTTATCCCAAGGAAATGAAAAAGTAAGTCCACAAAGAG
TTCTATATGAATATTTATAGGAGCTTTATTTATTATAATTCAAACTGTAAAAATAATTTCAATGTTCATC
AATAACAAAATGAAAAAATAATTTGCAACCTACTGGTACACTTGAATACTATTCAGCACTGAGTATCTTA
AATAGCATGGATGGAGCTCAAAAATATACTCAGGAAAGAAGCCATGTATATTCTGTATGAGTTCATTTAC
ATGAGATCATTTACATTTCCTCCAAAAGAGGAAAAACTAATTTCTGTTGAAAGAAACCAATGTATTTGCC
TCTGGCAGTGGTAAGGGGGTAGCACAGATTAATTGGGTAGGGACTCAAGAGAGTTTCTGGGGTCACAGAA
ATGTTCCGTGTGGTGATGGGAGTTTGGGCTCCACAGGTATAGGTGTTGATCCAAAATCATCAAAAAAACA
ACATTGCAGATCTGTGCATCTCACTCTGTGGGAAAGTATATCTCAACTGTAAAAAGGGCAGAAATTGCTT
TTAAACGCTCAGCCTTTTAGCACATCCAGTTGCTTGGAGAACCAGCTTACTCAAATGGGGGTCTAGGCTG
GAGACTAGGTCACAGGCATAGAGTCTCTAAACTTTCCCATGGCACATAATACGTTTCAGGTTTTCTCAGA
GAGCTGCAGGTTAGTAATCTGAGGATTCTGACAAGTTGGGTCAACGTTCCTAGGAGGCATGAATGGGAGT
GCATTCTCTAAGATCCCTCCACCCCAGGGTCCTTGCTTTCTGTGCCTCTTACTCCATTGTTTTCTGACTC
CTCTGTAGCCACTCGACCTCTTCAGATCCCATTGTCTACCCAGCCATCGCCCTTTATGACTTGGGTCCCA
CTGTTCTTTCATCTCATCCTCCATTCCCTCAGTTTCGGAGTGGCTGCCGCTAGCAGAGGATGGACTGAGA
GCAGGAGAGGTGGTCCTGCCCAGGAACCCATCCTAGAGAAATGGCATCCTGTCTGGGAGCTAGTTTTTTA
GGGCAGGTTTTATAAGTCTTGTAAAGCCAGACACACTTGATCTACCTGGTATGTTATTTACAGTAATACT
ATTTTCATAATTGCTTTTCACTCTAAAAGTAGAGCCTTTTAGCTACACTGTGAGTAAATAAAGGGGCTGG
CCTGGGAATGGTATCATGTTGGATGTTGTTTCTTCCCTGAAGTAATATATATCAGTTACAATTTACATGT
TACTGCAGAGTCCTAGAGAGAGACACAGAGAATGAGACAGATACCAATACATTTTTATGTGCATTAAAAA
AATCTAAGGCCAGGCGCAGTGGCTCACACCTGTAATCCCAGCACTTTGGGAGGCCGAGGTGGGTGGATCA
CGAGGTCAGGAGATTGAGACCATCCTGGCTAACACGGTGAAACCCTGTCTCTACTAAAAATACAAAAAAT
TAGCCAGGCGTGGTGGCGGGCGCCTGTAGTCCCAGCTACTCAGGAGACTGAGGCAGGAGAATGGCTTGAA
CCCAGGAGGCAGACCTTGCAGTGAGCCGAGATTGCGCCACTGCACTCCAGTCTGGGCGACAGAGCGAGAC
TCCGTCACAAAAAAAAAAAAAAATCTAAAATGCACTCTTCAAAATCTATGTCATTTATTCTGGAGGAATG
CAGTTGGCAGAAGGAGGAAGATATTCCGAATTTTTCTTGTATACATTTATGTATGATCTCAGTTTTTTTA
TGGATCATAGACCAATTTTGATATTTTAAAATAAAAATTATAATCTATCTTGGAAATTTACATGGTTCTT
TAGAACTTGAGGACCGTTTTTGCTTTTCGGAATATTATTGTACCTAAAATGGGAATATTACAACGTCACT
TTTTAACACTTTGTTATAACAAAGTTTAGACAGCGCTGGGTGCCCCTGAATTTTTTCCCGCCTCTTGTGA
CCTGTGTTGTTTTGGAATTTGCAGTGGCCTGACCGAGAACTACTGCAGGAATCCAGATTCTGGGAAACAA
CCCTGGTGTTACACAACCGATCCGTGTGTGAGGTGGGAGTACTGCAATCTGACACAATGCTCAGAAACAG
AATCAGGTGTCCTAGAGACTCCCACTGTTGTTCCAGTTCCAAGCATGGAGGCTCATTCTGAAGCAGGTAA
GAAGTCTGTGGCCAGATATCTACACATTTGAACATTGGGATGAAAAGAGATGGAAAATCTGACTGATGCA
GAAGCCTTCCATGCTACACAGAAACTTGAGGGTATGGCAGGTGGAAAGAAGCCTCAGCACTCTCTCTGGT
GGAGCAATTTTTGGCGCAACGTGCGTGGGCGGTGACTTCAGGAATGGTGCAAACCCACCTGGGCACTTGA
CTTACCACTCACTTTGTTATGAAAGGGGTTATCTCGGTGTTCCAGACAAAATTCCAATTCTAACATCAGG
CCAAATTTGTGCCAAATTTCACACTAGTGAGTGTTTCCAGGCATTTATTAAAATGGACAGTGTTCATTGC
AATCTTCAGCATTGCAGTTGCTGAGGTATGTGGCCGCTGAGTTTGTCATCCTGGGGAAACCTAATATGAT
GATATTTATTCCATCTAATCCTGGGGCTATTTGGCAGTAAATACCACAGAATACACTATTTCTCTGGCTT
ATTTCAGTCTTAGGTAGGCTCTGCACACCTATGCTTGGAAGGCAGGAATTTCTTGGTGTTCTTGTGCCTT
CTTCTCATGGAACGTGCATCTTTGGTGTGTGTTGAGAGGAAGGGTAGTAGACTTCTGCTTTGTTGCAATG
CAGGATGCTGGAACAAGAGGATTCCCTGTCTCTACTGTAAGGGAATAAGATTTTAGCCTCCATCCTTCTC
TAAGAAGCAATGTGTCTTTGCCTCCAAGTACTAGATGCAGGACCATGAACTGCCCCGTCCACCAGAAGCT
TAAGGCTTTGGCTTTTCAGGAGCAATCATCTAGGGAACTGTGCAGGGTTTTCATGTCTGTCCCCTACTGA
CAGCCAATCACCATACAGCCTGCATAACCTAATCCATCATCGTCTGGTTTCCTGCCTCATTGTTTTCATG
AACAACCAGTAGAGAGCCATACGAAAGAGCTTGCACATGAGTCTTTGTTCCAATTGTAAGAGCACTGATA
GGTCCTTTTCCCACCAGGTTTTGAATATAAAATTTCTAAGAACTTATTAAAATATTAGAATGTTATTAAT
CTATTGTTTTTGCTTCAGCATGTCCTTCTGCTTGTGAGTATACTAAAGAGAACAGTCATAATTCTGAAAC
TACTGTCCTGTTTGTGTCATAAATTGCTTCACATGTTTCTGCATACTAGTAGTTACTCAGCTTGATTTTG
TCTATTTTCAGCACCAACTGAGCAAACCCCTGTGGTCCGGCAGTGCTACCATGGTAATGGCCAGAGTTAT
CGAGGCACATTCTCCACCACTGTCACAGGAAGGACATGTCAATCTTGGTCATCCATGACACCACACCGGC
ATCAGAGGACCCCAGAAAACTACCCAAATGAGTATGTCTTTGATGTTACTTGTAAGAGGAGCAACAGCCA
ACTTAAGTTCCTCCTAGAAGAGCCTTGCTTCAAGCTAACTTGTTAGGACAAATTTCCCTTAGACCCAGAA
GGTGTGTCAAAATGTCCAGACAACTTTGCTTTTGATCAAAGAGTCTGAGAGAATAGGTATTTTAGGCTTG
CTATCTTTTCTAATAGTCTGATGGAAGCAGAAGGCTACATGGAGCTGATGAGGTCTTTTTAATATAAAGC
TCAAGAGATCAAATGATCAAATACTTAGAGTGCCATTCTACAAGGCTCATAAAAGATCAATGCACTCTTT
CACCCATGCAATTCTATCATTCTAACCTCCCTTCTCTGAAATGAAGGCTTTTTGCCATTTTTGTCATGGG
TCACAAGTAAATAATTCACATGTATATGAGTATATATATAACCAGGTGTGTTTATTCAGACTAGTATGTA
TATATATACATATATATGTTCATATAAGTTAGTATTCATATATATGTTCATATATATATGTTCATACAGA
CTAGTATTCATATATATATACATATATATATACACACACATATATATATATATATATATGTTCTAGGGAA
ACATGCAAGGTTTTTATGTCTGTCCCTGACTGATGACCAAATACCCTATAGCCTGCACAGCTGCAAGCTG
TATAGCCATACAATTTGCAGGACACACACACATACACACACACACACACACACACACACACTAACATATA
ATATAATATAATATAATATAATATAATATAATATAATATAATATAATTAATATATATAAACCTGTGTGAA
CACACTGGGTTCTAAGCTCCAGTTTTCTGAAGGGATATGGGTTGCCAGGAGAGGAAGAGCAAAAGCAAGA
ATGTAGATGAGAATTAGGAAGTAAACAGATATGGAGATTAAAATGGGCAGGTACATGGACAAAAAACCAG
GTCTGACAAAAACTGGCTTTCTGCCATAAATGACTATAAAAGATATTAAAAAACACTTTCCACATGTTGG
ACAAGAGACAGTACAGGACTGAGATAATTTAGAAAAGGAAATGAATGAGCGCAACTCCGTAACTATTATG
ACTTTCTTCCTGGAGAACCTTCCTGGACTGAAGGGCAAGGAATTGGAGCCAAAGCCAACCACAGCAGTCT
TGCTGAACTGAGGAAAGAGACTGGAGTTTGGGATAGCTAAGAAAATGTGTATTTTCTATGCTAGGTAATA
ATGAGAAAGAATTTGTGGTGAAAAGGAGCTGAAGGAATATGCATGGAAGTCTAATATAAACTGCATATGC
ACAGGGAGAAATTCTACAAAGTGGGACAGAGAACCACTACTGGGGAAAGGACAAATTCAGGGAAACAGTG
AGCTCAATGGTGACGCCAGAGCTCACGTAGCACTGGGGGATACCGGGGTTCTGATCAGCCCGAGGAGAGA
CACCTCATTGAACATCTCGGGCATTCAGTAGAGACCCCAGAAAAGTCATACTTTAGGAGTAGGATTTATG
CCTTCTTAGAATAAAGACTACCCCAGAAACACCCTAGTAAAGCTTAAAAACCAAGTCTAAAAGGACCCAA
ATGATCTCCAAGTAAATTAACTGCCTGACAGAAGAAAACTCAACCATCACTGGAGGTAAATAACATGATT
ACAGTGCTCTGTAATGTTGCATTCACAAGGAGTGACATCATTTAAAAATTTATGAGGCAGGAAAAAGCAA
TTAGTGTGATCCATAACTAGGAGAAAAACCAGTCAATACAAATAGACCAAGAAATAGTAGAAACGATGGA
ATTGACAAAGAAATTAAAACTGTATATATGATAATTGTGTTCAAAGATTTAAAGAAAACATGAACATGAG
GGAAACAAATGCAGAATATAAAAAAAAGCAAATGCGTAAAACAACCAAATGGAAATTAAAGAACTACAAA
AAAGTATAACCTTAATAAAATACTCACTGGATGGCCTTAATATTAGTTTATACATTACAGAAGAAAAAGT
GAACCAGAAGATAACTCAATGAAAGCCATACAATCTGTAAGACACACACACACGCACACGCGCGCGCGCG
CACACACACACACACACAGAGAGAGAGAGAGAGAGAAAGAGAGAGAGAGAAAGGCTGAAAAAAATAAATA
GAACCTTAAGGATATCAGTGAAAATAGCAAAAGATTTAATATATGGGTAAAGCAAGTCACAGAAGGACGG
GAAGGAGATATTGGGACAGAAAAAAATACTCAAAGCAATGATGGCTGAAGACTTTACACGTATGAAGAAA
ATGATAAACTCACAGTCAAGAAGCTCAATGAATCAGAAATAGTATTTTTAAAAGCAAAACTCTATGATTT
ACTTGGGTACATTATAGATAAATCGTCCAACATCAAAGATAACAAGGATAATCTTATAAGCCAGAGGAAA
ACAATATCATTTACATAGAGGGACAGTAATGAAAGTGACCGATGCCTTCTCCTTGGAAACAATGGCATAA
CATCTTTAAAGTGATAAAGAGAAATAAAAACAGATCAACCTAGGACGACATGTCCAGCCAAAACAAACAA
ATAAACAAAAAAACCCTTTAAAATAAACGTGATGTAAATACGTATTCTGCCACCTCCAGAGGAAACAAGC
AAAAAAACAAAAGAATGTTTCCAAGGCAGGCTTCTGTATTAAAAGATTTTAAGGAAAGTTATTCAGGTAG
AAGAAAAATAATACCAGATGGGAACTTTAATCCATACTAAGTAATGAAGAGCCCTGGAAATGGCAAATGG
CAATGTCAATATAAAATACTCTTATTTATCTAATTTTTAAATGTATTTAAAGGACAATTTGTGATATTAA
TTAAAATAATAGGAATATATTGTTGTTTCAACGTATGTAGTAGTAAAATTCATAAAAACAGTAGCACAAA
TAATGCAGATGATAACTGGAAGTATACTGTTAATGAGTTTTTTGCATTATCCATGAAGTTATATAATATT
AATAGATGGTTGAATGTGATAGTTTAAGGTGGGATATTATAAATCCTAGGACAACCAAAAAAATTTAAAC
TGAGAGGAATGGATAGTAAGAGGAATAGTCCTTTTATGCAAAAGAAGGAAGAAAAAGAGGAATAAAGAAT
ATAAAAGATATGGTGTAAACAGAAAATACATAGCATTATTGTAGACACAAACTGAACTACCTTATGAGTA
TATTAAATATAAAAGGATTAAGCATTACAAATAAAAGGCAGAGATTGTAAATTGAATAAAAACCACAGCT
AAGTGTGTTCTTTTTAGAATAAATACTCTTTAAGTGTAAAGATCTACTTTAAACACCAAAATATGAAAAA
GGATATATACCATGAAAACCTGAATCATAAATAAGCTGGAGTGGTGATTAATGGATGCAGGCACTCCTAA
AGACTAATAAGTGAATGTGGTCAAATTGAAGAAACAAAAGTATATACGTGCTCAATGTGCAAAAACTTTT
TCTGTATACATGCTATGATCCTTTGGAAAATTAAAGTTTTAAAGCAATATCACTGACAATAGTATCAAAA
CCAAAAAATATTTAGTGATAAATTTCACACACTATGCTCAAGGACTATACACCTTGCACTAGAAAACAAT
GTTGAGGAAAGAATTAAAAGATCTAAATATACACCATGCTTATAGATTAAAAGACTCCATATCAGTTCTC
GTGAAATTGATCTTTGGATGAAACCCACACCCAAGCACTATTGCAACAGTCCTTTTTTGGAAAAAAAAAT
TGGAGGACTTATATACCTTAATATAAAGACTTATAAAAGTACAGGAATCAAGACATGTGGTATTGGCCTG
GCCCCTTGGCTCATGCCTGTTACCCCAACATTTTGGGAGGCTGAGTCTGGAGGATGGCTTGAGCCCAGAT
GTTCAAGACCAGCCTTAGCAACAGAGTGAGACCCTCTCTCTACAAAAAATAAACAATTAGATCGATGTGA
TGACTTGCACATGTAGTTTCAGCTACTCGGAATGCTGAGGTGAGAGGATTGCTTGACTCAGGAGGTCTAG
CCATGAGTGAGCATTGATCATGCCTCTGCATTCCAGCCTGGATGATGGAATGAGACACTGTCTCAAAAAA
AAAAAAAAAAAAGGATATGTGTTATTGGCCAAAAAAGTATGCAAACCTAAAAAGGGATGGCCCACCACCA
GACCCACATACATATATGGTAAATGGATTTTCCGTATAGATGGCAAAGCAATTCAATGGAGACAAAAATG
TTTTACAAAATCATTCTGAACCATTTGGATATCCATGATACAAAACAAAAGCAGAACTTGACTTTTGCTT
TTCATCTCAAATTATTTTGATATCTCTTCCACCTAAGTGTCAGAGCTAAAACTGAACCTGAAATATGAAA
GTTCCATGAAAAAATATAAAATCTTCACAACCTTGGAGAAGGCAAACTTTTTTGAGGCAGGAGTCTGTAA
ACACTCACTATAAAATAAAACAAATTATAATGTGGGCTTTCATGAAAACTCATGCTTACCAAAAGTCATT
GTTAAGAAAATAAATAGGCAAGTAACACATGAGAAGAAAAATGCTCTCTGTCCATATATCTGACAAATGG
CTTGTGTCCAGAATATAGGAACATTTCTCCCACTCACTAAACAGAGGACAAACAACTAATGGGCAACAGA
TTGAATAGGCATTTCTTGGGGATAGATAGATGTACACATAGCCAATAAGCACCTGAAAAAATGTCCAGTA
TCTCAGCCATGAAAAATAAAGAGTTATAATCATCATGAGATGTCACCAAACACCCAATGGACATGGATAT
TATTAAGAAGACACCACAGTAACTGATGTCACTGATGTAGAGCAAGGATGTGAAACTCTCTCATATGCTG
GTGAAAGTGCAAAATGATACAACCACTTTTGAAATCAGTCTGATAGTTTCTCCAAAAGTTCAATAAATGC
ACTTTTACCCTACAAACCTGCAATCCTGTTTGTGAATATTTACCCCACAGAAATGGAAACATAAGTCCAC
GAAGACATCTCCAAGAATATTCATAGCAGCTTTATTTTTTATAACCCCAAACTGTAGACAATTTCAATGT
CAATCAATAAGAAAATGAATAAATAATTTGTGAACTAGTCATACAATGGCATACTGTTCAGCAATAAAAG
GGAGCATGTTTTTGATACTCTCAAATAGTATGGAAGATGCTCAAAAATATTACATTAAAGAAAGATGCCA
GATAACAAAAATGAACATTATGTATGAGTCTATTGATGTAAGGTTCCAGAAAGGTAAAACTAATTTCTGG
TGAAAGAAACCAATATCATTTGCCTCTGGCCATGGGAAGAGAGTAGCAGAGATTGATTGAGCAGTAAAAC
GAAGTTTTTTTCTGGGGTGATGTAAATGTCCTGTATTGTGATTGAAGTGTGAGTTACACAAGTGTACATG
TTCATCAGAAGTCATCAAACTACATCTAAGATCTGTGCATTTGACTATACATGAAAATATACCTCAGTTG
AAAATAGATCAATAACCTCCCTCATATACTATACTTGCTAACACAGCCAGCTGCTTGGAGAACCAGCTTG
CTGGAATGGAGAATCTGGGCTTGAGACTGGGTCACATGTATAGAGTCTCTACAGAGACAATGTTGCATTC
CCACGGTACATAATACATTTCAAGGTTTCTCAGACAGCCACATGTCATGAATGTGAGGATTCTGAGAGGT
TGGAGCAACATTCCTGGGAGGAACGAAGGGGAGCACATTCTCCAAGATCCCCCACCACCGGGGTCCTCAC
CGGCTGTGCTTTTTTTTTTTTTTTTCTTGACAGAGTCTCGCTCTGTCGCCAGGCAGGAGTGTAATGGCCC
AATCTCGGCTGATTGCAGCCTCCAACTCCAGGGTTCAAGAGATTCTCCTGCCTCAGCTTCATGAGTAGCT
GGGACTACAGATGTGCGCCACTGCGCCCAGCTAATTTTTGTATTTTTAGTAGAGACGGGGTTTTGCCATG
TTGGCCAAGATGGTCTCGCTCTGTTGACCTCGTGATCCACCCGCCTTGGCTTCCCAAAGTGCTGGGATTA
CAGGCGTGAGCCAAAGCACCCAGCCTGTGCCTCTCACTTACTCAATTGTTTTTCTGAACCCTCCATAGCT
GGTGGACCTTTTCAGATCCCATAGTCTAGCCAGCCCTCTCACTTTATGCCTTGGGTCCCACTGTTCCTTC
ATCTCATCCCCCTTCTGTCAGTCCCGCAGTGGCTGTGGCCAGTAGAGGATGGACTGAGAGTAGGAGAGGA
GGTTCTGCCCAGGAACCCATCCTAGAGAAACAGCATCCTGCCTGGGACCTAGTCTTCCAGGTCAGCTTTT
ATAAGTCTTTTAGACTCAAACTCACTTGACCCACCTGAAGTGGTATTGACAATAATGCTATTTTCATGGT
TGTTTTTCACTGTAAATGCAGAGCCTTTTAGCTACACGACTAGTACAGAGAGTAAGGGAGGCTGGCCTGG
GAATGATATCATCTTGGATGGCATTTCCTCCTTGGAGAAATATATGTTAGTTCCAACTCACATGTTACTA
TACAGTCCTGTAGAAAGAGATACAGAGAGTTAGACAGGTATAGACGCATTTGTATATGCATAACAATCTA
TAAGACACACATCAAAATCCGTATACCGGTTCCTCTAGGGGTATGTGCTTGGCAGAAGGTAGAAGGAGGG
TATTCTGGTTCCTTTCTTTTGCACATTTATGTATGATCTCAGTTTTTATATGGAGCATTGATAGGGTTTG
GCTATGTCCCCACCCAAAATCTCATCTTGACTTGTAATCTCTATAATCCTGATAATCCCCATGTGTCAAG
GGCAGGACCAGGTGGAGGTAACTGGATCATGGGGGCAGTTTCTCCCAGGCTGTTCTCATGACAGTGAGAG
AGTCTCCTGAGATCTGATGGTTTTGTAAGTGTCTGGCATTTCCCCTACTTGCACTTACTCTGTCCTGCCG
CCTGTGAAGAAGGTGCCTGTTTCTCCCTTGCCTTCTGCCATGACTGTAAATTTCCAGAGGCCTCCCCAGC
AATGTGGAACTGTGAGTCAATTAAAACTCTTTTCTTTGTAACTTACCCAGTCTGTCTCGGGTATTTCCTC
ATAGCAATGTGAGAACGGGCTAATACAAGCATATACTACTTTTGATATTTTAAAATAAAAATTATCATCT
ATCTTTGAAAGGCATGCACAAATGGGAAGTTGAGGAACATTTGTGTTGTGGCAATTGTATGATACCTTTA
ATGGGAATATTTCAAAGACACTTGTTAAGACTTTGTTAGAACAAAATGTAGAGGGTGCTGGATGTCCCTG
AATATTCTTCCGCCTCCTGTAACTTGTATTGCTTTGGAATTTCCAGTGGCCTGACAATGAACTACTGCAG
GAATCCAGATGCCGATACAGGCCCTTGGTGTTTTACCATGGACCCCAGCATCAGGTGGGAGTACTGCAAC
CTGACGCGATGCTCAGACACAGAAGGGACTGTGGTCGCTCCTCCGACTGTCATCCAGGTTCCAAGCCTAG
GGCCTCCTTCTGAACAAGGTAAGAAGTCTGTGTCTTACCTTGTCTAGCACATACCTCTCTATGTGCTTGG
ACAACGGGATGAAAAGACATGAAAAACCACACTGATGCAGAAGCCTTTAGTGCTACACGGGAGCTCGAGT
GTTGGTTGAGGTTCTGCCATGACCAAGGAAGTCTCAGTGCCGTCCCTGGGAAAGCCAGAGCTGTGATTTT
TGGCACAACTTGTGGGAGTAGTGACTTTAGGACTGGCGCAAAACCTCCAGGGTGCTCAACTTAACCACTC
ACCTTATTCTAAAATGGGTTATTTCAGTGTCCCAGTCAAATTCCTATTCTAACATGCTGTCAACTGTGTG
ATTATTTCCAAGCCAATAAGCATTTCCAGTAATTTCTTAAAATAGTGTTCATTGCAGTCTTCAGCGTTGT
GGCTCCTGAGGGATGTGGCCCCTGATTCTGTCGTCCTAGAGAAGCCTGACATGACTGCATTGATTCTGTA
TCGTCCTGGGTCTATGTGGCTGCCTGGCTGTCTGTAATCATCTGTTTTATTTTTATTTTTTTCTACAGAC
TGTATGTTTGGGAATGGGAAAGGATACCGGGGCAAGAAGGCAACCACTGTTACTGGGACGCCATGCCAGG
AATGGGCTGCCCAGGAGCCCCATAGACACAGCACGTTCATTCCAGGGACAAATAAATGGGCAGGTCTGGA
AAAAAATGTAAGCCACTTTGATTTGGACTCTTTTTCCCTTTGCTGACAAATCTTTTCAAACAGAAGAGGG
GCAGAGGAAAATACTGGAAAGACTTCAGGAGGCTAAGCGTAATTAGCCTTAGCATGGAAAGTGCAAGCAG
CACAGGCCAGCAAAGCCCCACGCGTGTGGGGGTTCTCAGGCCTCTTCTCTTTTGACATTTCTTTACTGTT
TCCATTGTTGGGTGCTGTTTCTCGTTTCTAGTGCTTGTCCTCTAAGCCAGGGGTCCCCACTCCAGTACTG
GTACTGGTACTGGTACTGGAACTGGTAATTATCTGTGGCCTGTTAGGAACTGGGCTGCACAGCAGGAGGT
GAGCTTCGGGGGAGCAAACAAAGCTTCATCTGTATTTTCTGCTGCTTCCCATCACTCTCATAGCTGCCTG
AGCTCTGCCAGCTGTCAGATCAGAGGCAGCATTAGATTATCATAGCACAAACCCTATTGTGAACTGCACA
TGTGAGGAATCTAGATTGCATGCTCCTTATGAGAATCTAATGCCTGATGATCTGTCATGCTTCCATCACC
CCCAGATGGGACCACCTACTTGCAGGAAAATTAGCTCAGGGCTCCCACTGATTTTACCTTATGGTGAGAT
GCACATTTATTTCATTATATATTACAATGTAATAATAATTGAAATAAAGTGCACGATAAATGGAAGGTAC
TTGAGTCATCCTTTAACCATCGCCCCCTCACCCCAGGTGCACAGAAAAATTGCCTTTTATGAAACTGGTC
TCTGGTGCCAAAAAAGTTGGGGAACCACACTGCTCTGGGTTCTAGTAGTCAGAGATGCCCTCTATGAGGC
TTAAGTCAGATTTTTCTAGAAAAGATTTGGATGGGCCATCAGGTCACCATGAGACTTCCCTTAGCCTCAT
GCATTCTCTGTGATGGTTTACTTTGGGGCCTATGAATAGGGAAGACTGAGATATAGGAAAAACCAAAGTG
TCTGTGTTCCCCCACTCTCACACCCATGTAACATAACACTTCTCACACCAGATATGGGGGGATTTCTCCT
CACACCCCAAGCGAGTCTCCAGCAGATACCAGCTGGGTGTCCTACAATGTAACTCGGTCCTGACACTCTA
TCTGGAGACAGTGTCAGATCCCACAAGTTAAGGCTCAGTCCTACAAGACTGCCCCACTGCAGATGCCAAT
CCCAAGTTGCAGGCTGTGACCTGTACTTCTGCCCAGCTGGATAAAGATCTGTTTTTCTATATGACCCTCC
ATGGGTTTGATTACTTTGCTAGAGTGGCTCACAGAACTCAGGGAAACACGTTACTTTTATTTACCCATTT
ATTATAAAAGATATTAAAAAGGATCCTGGTGAACAGCCAGGTGGAAGAGATGCACAGGGCAAGGCACGTG
GGAAGGGGCTCAGAGCCTCTATGCCCTCTCCAGTGCACCAGTCCCCAGTACCCTAAGTGTTCAGCAACCC
AGAAGCTCTCCAAGTGCAGTCTTGTTGGGTTTTTATGGAGGCTTCATTACAGAGGCACAGTTGATTACAT
CATTGGCCATCGGTGATCGGCTCACCTTCGGCCCCTCTTCCCTCCCTGGAGGTTGGAGGGTGGGGCTGAA
CAGTTCCAACCCTCAAGTCACATGGTTGGTTCCCTTGGCAACCAGCCCCTGGGGCTATCCAGGAACCCAC
CAAGAGTTGCTTCATTGCAGCTCCCTTCACCCAGGAAACTCCAAGGGATTTAGGAGCTCTGTGTTAAGAA
CTGGGGGGCAGAGACCCAATATACATTTCTTATTCTATCACAATATCACAGGAAGCTAAGGATGATACTG
CCTTTGTGTGTCTTGGCTGTGGATGGTGCATAATGCATGGAAGTAAGCATTTCTGAATCAACAGCAAACA
GGCTTTATCAGGTAGAAGACCCCTCAGCGCCCCAGGGACAAAGCTCATCAATGATGTCCCACTGTCCTCT
GAGGCTCTAGCTCTAAGACCTCCAGTGGGTCAAGCTCCTGGAGAAGTGGCACATTCTCCAAAGACCCTTC
AGGGTCACCACACCCTGGTTAAGGGTGTGGCCTCATAACTCCTTTTGACTATGACTGATGGCTTACAGCA
TAGAAAGAAATAACTTTGTCAAAAAATATAATAATGATAGAAAGGAAGAAGGAACGCTCCCTTTTGTCTT
CTAAGAATAGATGTGAAATGTGTGTGCCTTAGAATATCTTCTCCCTCTCCTGCTCCACGTGAGCTGGAGC
TTACATGCCTGCTTGTTTTCAGTACTGCCGTAACCCTGATGGTGACATCAATGGTCCCTGGTGCTACACA
ATGAATCCAAGAAAACTTTTTGACTACTGTGATATCCCTCTCTGTGGTAAGTTGCCTTCTGTTTTGGTAA
GGAAACTGCTTCCTTAATATGGATTTGGAAAAAAAAAAGCAAAAAAAACAGAAAATGGCTTTTGAGCTGA
GTGCTTCTGGGGAGGAGATGGCTGCCCTCTCCACCAGAGCCTGCTTTTCATCATGGCCACCTTGAACCTG
CCCTACTATTGGCCCCATTTGTTAGGAAAACACCCGCCCCTCCCACCACACACACATAAATAAAATAAAT
GTCAAATTCCCAAAGGGCAAACTTAGAGGTGATCTAATCAGCCCGGGATAGTCCCACCGAACCCTTCTTT
GTCTAGCGTGGGATGCATGAAAAACAAATTTAGAGTCATTATGATGAAAAACTGTCCTCTTCTGCAGCTG
AGAAGAAAAAAAAAATACGAGCAGCAGGAAACAGCTAAGCATGTAATGCACATTGTAAACCTCAGATGGC
CATCCTAGGAAATCAATGAAGGGTAGTGCAGCTCTTTAGCCCCAGATGGCCTTTCTCGTAAGATTACTAC
TCATGAGTCCCATTAGCGACATTGCTTAGAGACTGCTTGTTAGGTTCCTTCCTCATTGCTCTGAGACTCT
TATTGGGAGTATGAGGCTTGGATCAGGGGAAGGGGAATTGACATTAGATCTTAAATGATTGGGGTAACAA
ATCCATGGGGGAAAAAAAGCCACTTGTACTTGTTCCCTATTTTCTTCCTGCTGACCAATCAACTTGTCTG
TCCGAGTTACAGAACACCACCCTGGACTTTTCTTTTGTGTAATTTGGTTGCTTGTGGTTGGGTCTGCCAT
GTGAAGGGACCTTGAGCTGGGGGAAGAAGGTTGGCCTCCAAGTCCACTGAAGACCAGCATCCTGAGATTG
CCTGGGGAGGTGGTACAGGGCAGTGATGAAGATCATGGGAGCCACACTGCCCATCGTCACATTTGGGCCA
CTCCTGGGGAGAGCAAGAGGGAAGAAGGAGAGGTTAGGGTGATAGGAAAGATTCTACTTGGCCAATATTA
TTATAATGTGGCATTGTGGTCTCTGGATTTAGTGTGAGTTGATAGCTGACTTTTTTCTCGAGTGGGTGCT
TTTGTTCTATTTTGTCGGTGCTATTGCAGAAGCATCTTGGTGGTTCCTCTACCTCAAAGTCTCTTGATGG
GGTCAGTTCCAGTTCTCCGCTTCTGGCCCCATCTAGTACACGCCACTGCCTCTCACTGCCTGGGCTCTCT
ATCCTTGACAGGCTGCCTTGAATTTAAGCCCAGTCTGACTTACCTGCCTCAAACACCCACAGTAGTGCCT
GGGACTCATGCACCTTTGACTCCCATGGAAGGGAAGTGCAGTAGCTTCCCAGGTGCAATTCTGCTGTCCT
CACCCACATTGAGGATGTATGAGAATCAGGTTCTTAGAGATTGGAGAAAGAAGGAAGAATGGGAACAAGA
TTTCTTCCAATGGACTGTGAGGTTCCCCACCTTACTTTGATGTAAGACAAGTGAGGTTAACCCCAAGCCT
GGTGAGGAGGGTTCCCATCAGACACTTGGAAATCCTGAGGACTGTTTCCTGCAGAAGGATGTGGTTGGTG
GGATATTCAGGTTTGACTCATGATTGAGAAAGTTAGAGCCTCTGGTTGGAGAAAGAGTTTAATAACTATT
TCATTTCCACCAACACATTCAGTACGAATAATAAATAAGTAAAAATAAATAGAAACATTCAGTTTTATTT
TGAATAGTAGGAGTAGGGTATAATTTCTGTAGTTACTCTTTTAGTACAATGATGCATGTTTACTGTATGT
AAGGCATACTAGCAGAAATTGAGCTCAGCACTAGAAAAGATGATTGCATTCCATGCCATGCTTCTTTTTT
ACAAAAGACTTCTATAGATAGATTCTCAAAACAACCCACAGCAAATGAAAAGTTATTTGGAAAACTCAGG
TTCCAGATTCACTGGAGTGTAGAATCTCTGGTTGGTTGGGGAGGAATTTCCTCTTGCAGTTGTTATTAAT
AATTATATGAATAATTATTAACTATATTAATATTTATAGTTTTGAAGACCTTGAAGGGCTGGAGACAACA
GAGAAGCATTTTTGAACACCCTCTGTAGCCCCTGCACTGTTGTAGGCATTGATGGGTGGTACCAAAGATG
GGACACTTTCCCTACCTCCAGAGACCTTGTGGGCTTGCTGCAGAGAGAAGGCAGGGAGGAGGAAAAGAAG
AATAGAGGCACATGTGTGTAAATTACCCCCACAGCAGTCAGTTAGTCATGGGAGGCTCCCCAGAAGAACT
GTCCTGAAGCTGGCTGAGAGAAGGCAACATTTCAACATAGGACAGTTATCCTTGCTACATAAAATCACAT
ACACACATGCACATATGTCCACACACAGAGACTCACATGCAAAAGAATCCTTTGTGCCTTTCAGTAAACT
TTACATGGTTTAGAAAGAACTTATATTTCCTTGAAAGGAGAGTGTCCTTTGTTGTTTACTACCACTTTTT
AAACTTAGAAAGAAAAATCTAAAGAGTGTTTATGATTTTACCATTTAATTTCACCTTTGAGATGTGAAAA
ACTAGTGCTTGGAATTCGTCCTGAATTAAACGACACAATTGCTAACTTGGACTCAAATGCGACTTCTTTT
CCCACCTTGTGCCACAGCATCCTCTTCATTTGATTGTGGGAAGCCTCAAGTGGAGCCGAAGAAATGTCCT
GGAAGCATTGTAGGGGGGTGTGTGGCCCACCCACATTCCTGGCCCTGGCAAGTCAGTCTCAGAACAAGGT
AAGAACAGGCCCAGAAACCATCTATACTGTCCTTCCATGTAAGCCCCACAAAACCCTTCTACATTTACAC
AGAACCCACACAGCTGATGCATCAATACCTGCCTCTCTGTTTTCTGAAGGAGGAAAAAATATAGAAAAAT
TAAAAAAAGTTATATTATTATAGGTTCTCTACTTGGAAAATAGCCAAAATACAAATCTTTTTCTTGATCT
GGGCAGTTCCATCAAAATCTGTAGGCACAGTGATTTGCACCAAGTTCCAATACTTTTGGAAAATATTGAA
GATGCTCTGAGGGTTTCTATGGATATCCATTGTCTCACTGTCAGATGAAAAGAAAGGGAAGTTTTTAGAA
ATGTGACACTTTGCAGTGAGGGAGGACAAGAGCAAACTTACCTACAGTCTATCACAGGCACAGATTTTTT
TTTACACTTTTGTGAATCATTGAATTCAATGCCGAGGCTATTCATCTATTCACAAACACATGAACAAATT
ATGGGTTGTGATCCCCATAAATGAAGAGTAATCAGTCCGAACCCACAGAACCTGGACATTTTGGGTATCG
TTTCAGTGGAACATGCAATTCGTAAGTTCAGTTTGCTTGGGTGTCTCTTAGGAAGAACACATAGGACACA
GACCCATCTGCCTGCATGTTTTGCTTCCTCATCTCCTTTCTACACCAGGGCACCTGTGCTCAATTGCTGT
TCTCCTCTAAAGAGACTTCCTTCTGTAAGTTTGTGAAATGCCATCGACAAACCTGATCGCATCGCATTTC
ACTCTGCTGTTGAGTTGATTTTTCTTTACTTTATCGTTTGTAACTTCTTGCTCTACAGAGCTTTCACCTT
CCACATATTTCAGATTCATTCTTTCCTAAACTGTGTGGTGGTCTATGTCCTCACTGACTATCAACATACT
GCCATCATGCACTTCCTATCTCTATTCCTCTTCGTTGCAATCTGGCTCCAAGTGGCTCACACCATTATTC
TGATCTATCAACTGCCTACACAGTCCTAGAAAGTAAGTGAGTCAAGAAACATCCCCCAAAAGTAAACTTT
TCAGGTAAGATCAGAAGACCCTCATGAGTCACTGCTGCTCAGGATCGTATCTGGCTCCTTGAAGAGTGAC
CTTGCATAGATCTTGTCATAAAAAATGAAAGAGACCTTGGGAAGGTCTTGGGCTGGTCACTTTTGTCAGA
GTCCAGGGCTGTGGGGTGAAAGCCACAGCTATAGAGCTTCATTCTGGAGTCACTTAGCTTTGCTCTCCTG
GGGACAGGCTGTGCCTATTCTTGCCTCAGGCATCAAAAAAAGTGGCACAGATGGGCCCTTCTGAAAAATC
TCACTACTGGAGCACAGCTCGAAGTTTCTACTATCCTGACGTTGGGCGGTAGTCCTTTGCTTTGGGAATA
TGAACATGATCAAAACTGAGTGAACTTGTCTTCCTGGCTTTCTGTACAATGAAGTAGAACAAACCATCCA
ATTTGACCAAAGCCTTGGCATGTTTTCTTTCTAGGTTTGGAAAGCACTTCTGTGGAGGCACCTTAATATC
CCCAGAGTGGGTGCTGACTGCTGCTCACTGCTTGAAGAAGTACGTTTAAGGGAAAACTGACATGGGGTCT
TATCTTCAAGACTTTTTTCCTCCCTCTCTTCCTCCATCCCTTCTTTCTTCCCACCCTCCCCTTCCTTCCT
CCCCACCTCTCTTCCTTTTCTGGAAGGAACACTAGGAACCAGGGAATGCATGCAGAATCCTGAGGCAGAA
TTTCCAGGGCAATTGGATGAGAGAGGAGGGAAGTGTTTCTAGAGGGAATCTGCAGAGGGAAGACCCAGTG
CAAGTGATTTTTTGGACCTGTATAAACCGCAGGACAGAGCTGTTCACTACCAGAGGCATCAATCTGTATT
GCATTGCTCTAGAGCAATATCTGAGGCTGAATAATTTATAAAGAAAAGAGTTTAATTGGCACATGTTTCT
GCAGGCTTTACAGGAAGCAGGATGCTGTCATCTCCTCTGCTTCTGTGTGGGCCTAAGGAAGATTACAATC
ATGGTGGAGGGCAAAGTGGGAGCAGGCATGTCACATGGCCAGAGCAGGAGCAAGAGACAGAGAGAGATGG
GGTGGGGGTGCTGCACAATACCAAATGACCAGACTTTGCAAGAACTAAGAGTGAGAGCTCACTGATCACC
ATGAAGATGTGGCCCAAGCCATTCAAGAGGGATGCACCTCTATGATCCAAACCCCTTTCACAGGCCATAG
CTCCATCACTGGGGACTACAGTTGAACACGAGATTTAGGTGGGGACAAATATACAAACTATATCACAGTC
TCTGATGAAACAGATTGAGAACAGACCTTAACTGTCAGTTTCCAGCAAATTGTGAATTTTGTTTCTTGCC
ACTCATAAGTCACTGATTCTGGGTGGCCGAGGGTGTCAGAGGGACAGCGCCAAGTTCATGGCACAGAGGA
TACCTGAAGGGGCTGGACCATATTTTTCTCTTGACATCCTCATCTTTTCTAGGTCCTCAAGGCCTTCATC
CTACAAGGTCATCCTGGGTGCACACCAAGAAGTGAACCTCGAATCTCATGTTCAGGAAATAGAAGTGTCT
AGGCTGTTCTTGGAGCCCACACAAGCAGATATTGCCTTGCTAAAGCTAAGCAGGTACTCGCTCACCTGTG
GTCTTCACCCCACGCTGGTGAAGATATTTGCTTTATGTCTGGGTTTTATGGGCCATGGCCACTGCATGGC
AGTGGGGAGGAACTGTCTATCACATGAAAGGCTCAAGGGCTTTGGGGACAGCATCAATCTTCAACCCCAG
CCCTGCCACATGTTAGTTGTGCTCTTTAAAAAGGCAGAAGGATTCGTTTCCTCACGTGGAAAAAGAGATA
CCCTGTTACCCGTAAAACTTACTTAATGTTCACCAGTTCATCCACATTCATGATCAGGGAAAGGTTGTTA
TTCCAGGCTAACTATTCTCCTTTCATAATAATATGCTGGAGAGAATCAAATGAGATTGCATTTCAAAGCG
CTTGAAAAACCACCATATCGAGCCATGCTTAGTGTGGGCGCCTCTAATCACTGCTATTCAGGAGGCTGAC
GAGGAAGAATTGCTTGAGCCCAGGACTTCAAGGCTGTAGGCAGCTATGATTGTGCCACTGCACTCCAGGC
TGGGTGACAGATCAAGACCCTGTCTCAACAAAAGAAAAGAAAACAAAACAAATGAACAGAAATATTCCAC
AATGTCAAAAAAAAAAAAAACCCACACAACATACAATTTACAAATGCAAATAATAATATTATTGTTGTCT
TCTTTGATTTTCTCTTTCCTGGTGAAATTTTGTTTTATTAAGCCTGACAAAGTGATACCTTTGCTTACAT
CACTTAAAGTTAGTCTATTTGGACCTAGGTGACAGTACAATCAGCTAAGAAACAGTATTTGTAGGAGAGG
CAGGTTTGGGACAGGTGACAAGGCATGTGGGGTGCTCGCTGTGCTGGTGGCTCTGGAAGGCAGGGTGTCA
ATGCAGACAGGGATGAGCATGGCCTGGTTGGGAAGGCATGGGGCAGGCAGGAGCCTGAGCTGCTCTCCTG
GGCCTGGTCACAAGCCCATGGCAGCTTCTCTGGGTCTGTGAACTGAGGGGTGATGTCCTGGAATCCTCTG
ACACTCTAGGAAGGAGAGAAGGGCCTTTCTGGCTCAGCCTTTATAAACAGTAGCTGATCTCCCTCTTGCT
CCCCAGGGTCCTCCCCACCATCCCAGCAAATGTGCAAATACAAGATCTCTGCTCCTCATGGTCCTCAGAG
AGCTGGGGTGTTCTGATGGCTTGAACAAGTCACTTAGGAAATGTGGGGTTTTGGAGGCATTCTCTGATAG
GCTGATACGTTTTGAGTTTAGAGTTCCCACCGCACATCCCCACACCCCTAGAGTCTAGGGCATTTAGTGC
TCCATGAGGGAACCTGTAGAGTGAGGACATCTGCATCACAGGCTGGGCCTTCTAGTGTCCAGAAGCAGAA
AGTGTGTCTGCTTCAAAGTTGGTGCTAATGATGATTTTTGGTCAGAATACGGCATTTCTCATTTCCATTC
CTTTATCCCCTTGAACTTACTAAAGTAGAATCAGGTCTAAAAACCAGAGTTCTAATCTTTAAGAGTCCCT
GGGATTCTAAGGTATATGAATGTCCTTGGAAAACAATACCATTTAGTTCATGCAAGGTGCTTATTTCCCA
TCCTCTTTCATTTGATGTCTAGCATTTTACTGCATTCTTACCACCACGGTTTAGTAACATTCACGAGGAG
GAAGTGGAGGATCCAGATGGAGCAACTTGCTCTGGGCACACAAGGCATTTGCAATTTTATACCCTCTTGA
TGATGTCTCAGCCAGACATTCTGCCCAGTCATCAATGCCCTCTTCAATTAATATGAAAGGACACACTTGG
CATGAGATTCCAATCGTGCACAGAATATACATGAGAAGTGTGCCTTTGTCATCCCTACTTTCAAAGGCTA
AGGCCACCCTCAGTTTCTTGCATGCAACTGATGCCTTTCAAATGAAACCTTACATCTGTGTAGTCCATAG
GCAACCACAGGCAAATGTGAGGGTGAAACGCTGTGTTCTACATTGTTCTGTGTCAGTGAAGCAAGGCAGT
GCCAGCTCAGAGGGCTCTGGGGCTTCAAGGCAGGGATGCCTGGTTGTAGGTACTGCCACTTCCAGCTGGG
CAGTGAAACATAACTGCTAATACTTTCCTTACAGGCCTGCCGTCATCACTGACAAAGTAATGCCAGCTTG
TCTGCCATCCCCAGACTACATGGTCACCGCCAGGACTGAATGTTACATCACTGGCTGGGGAGAAACCCAA
GGTGAGATCAATTCCATTGCCCACGTAACAAATTGTTTTTGACCTTCAGTGCATGTTACAAAATGAGCAT
TTTGGAGATAGTTGTACAAATTCCTACCCATGAATGTGGTCTACCCACTCCTGACTTTGCCTGGACACCT
GTCTATGTCTCCATAATCAGTCTTCAAGGGACTTGGGCAAGGGGAGCGGTGCCATTTCCTTGAGTCTCTC
TCTTTTTTGTTTTCAGAATCTTTTAATTTTTTTTGTAATGATTGTATGTTTCCCTTACAACAAAAACAAA
CACCAGTAGAGGTCTTTGAGTCTCTTAATCATAATTTCAGCATTCATATTGCTTCCCCAGGTAAGTGGGG
TTTTGACCCAGCCCTCAAGTTAAGGGTGTTAGATTATTTTTCATGTGAAATTAGACAGACTGCGTTTCTA
AACATGGTGCAAAACAGTAACGACAAAAGTTGTAATTAAACTATTCTTCTTCCCAAATACCCACATGTCT
AATGTGTGTGTGAGGGTGTTAGGCAGGGGACCTGAAGCTGGGGGAGAGGCAGACAGTTCCCATGGCCCCA
AGTCTAGGATGGCATTTGGTATTGGTTGATGGGTGAGAGCAAGAGAGGGAATATTTTTGTGCATGATGTG
GTATCAGCACCTGTACTACATTTTATGGATTCCTTCTTCTCTTTGCGGTATGCCCTGACAATAATTATAT
CCGTCAGCCTTACCCCCTTGGCAGTAGGAAAACTGAAACTGTCTTAAAGTCTCAGCTCTACTTTCTCAGA
GGTGCAGGCAAGGGCACTGGGAGTCTGGGGCCCTGGAAAACTGTTCTGACTCTGCCACTTGCCAGATAGA
CCTGAACTAGACACGTTACCTCTTTGTACCACTTGGCTCTAATCCCTTATCTGTAAAACCAGCATTTTCA
AATGGTGCTTTGCACATCAGCCTTTTGCATAAGCTTTGATTTGATAAAATGTTTTTTGTGTTTTTAAAAA
GATTAAAAACCACAGGTTTAGATAATTTCAAAGTAGGCTTCCCTTTTTCTGTCATTTTCCTATTATTTTT
AAAACCTCACCTCCTTGACTCCTTGTTCCCTTTTTCTGCACTGCTGAGTCTGGGAGCACTGAGGCCAGGT
AAAAGGAAACTTGGCAAATGAGGGGCACCTATGGGTGTGGGAGGCTGCTCCTGGTGTTTGCATATTTTAA
AATTTAAATGCTACAAACCACTGTGAGTTAGGTATTATTGTTCCTATTTTACCATTGAGGAAGCTGGGGC
TCAGAGAAGGTGGAGGGTGGTACAGACAAACCTGAATTGGAACCCTGGCTCCTGCCTATGGGCTGTCAGG
ACTTAGAAAAGTCGTGAGCTCTCGCTGATTGTTTCCTCAGCTGATGTGGGCTGCAGGGCTGTTATGGGGG
AAATAATAAGAAAGTGCATCAAGTGCTGAGCACATCCTAAGCACTCCATCATGGCAGCTCCTACTACTAA
TAAAGAATAGAATTATATCTAACATGATTCTTTCTTGCAAGTGACAGAAAATCCAACTCAAATTGGATTA
AGCAAAACAAGGGAAATTCTTAGTGAGCTGCAAAGTTTTCAGGCTCACATGATGGCCCCAAATCCCAGGT
CCTCCCAATCATGGAGTAGGCACTATTTGGGGGCACAAAGGTGACATTCCCATGGCTGCAGATGCTGTGG
TGCTGTGGCTGTACCGGGAAAGAATAAGAAAGGCCACTCTCCCAATTATGTGAACAATAGTCTGCCCACT
CTGAGAAGTCAAACTTGGGTCACAGTCCTGCCCCTGAACCCATCACTGACTGGCTCTGACCTGCACCAAT
TGTTCCATGTTGGAGGTGAAGGCAAGACCCCACTAATACCCATAAGGGGCAAAAGTTAGATAGATCCTTC
AAGAGGATTATGGGAGGTAGGGCAAAAAGCTGCTGGGCAGCCAGAAAGCAAACAGAGCCTCTATGATACC
TCAACTGATGAAAGCATGAAGCTAAAATCATAAGGATCTGGGTGTGAGTTCTGGCTCTCCCATCTTCCAT
GTGACATTGGGCAGTTATTTAATCTCTTTTAGCCTCCGCTTTCTCATCTTACATATGAGATAATTGTGAG
GATTAAGATTACACATAATCATCATCATCACCGTCCACCACTACCACCATCATCCCCATCAACATCATCG
CCACCACTATCATCATTCTTACTGGCACTACCATCACCATCACCACCATTCCACCACCATCACCAATATC
ATCACTGTCAACATCATTACCACCATCACCATCACCACCACCATCATCATTACTACCACTACCACTACTA
CCACCATCACCATCACCACCATTCCACCACCATCACCAATATCATCACTCTCAACATCATCACCATCACC
ATCACCACCACCATCATCATCATTACTACCACTACCACTACTACCACCATCACCATCACCACTGTCCCAC
TACTATCAGCATGACATCACCATCACCACCACCATCATCATTACCACCGCTACTACCAACATCACCATCA
CCACAATTCTACTGCCATCACCATTAACATTACCACCACCATCATCACTATCACCATCACCACCATCATC
ACCACTGCCATTATCACTGCCACCATCATCACTATCCTCTATATTTCCTCATCTGTATTATCATTACTAC
CACCATCACTATCACCACCATCGTCACCATCATAATCACCATCAACACCATCTCCAATACCACCATCACT
GTAACCATCATCACCACCACCATGATCACTATCACCATCATCACAATGATCACTGTAACCATCATTACTA
CCCACCACCATCACCACTACTCCACCACCATCACCATTATCATTACCATCACCATTATCACCACCATCAT
CATCACCAGCACCACCATCATCACCAGCACCACCATCACCATCACCATCATTAACACCATCACTATCACC
ATTGGTTTAATCATCACCACCATCATCATAAATAAACATCACATAACCAGGGTGTAGCTGGGTGTTGACC
CCAGAGCCCACTCACTGTTTCCTCTCTCCCACCCCCATCCACACATTTCTAACCACCATCCTGCACTGGG
CTCCCAGTCTCCTCTGGTCTCACCCACATGTCCACTGAGAAAAGGATTTTCAGAACACCAACTAGACCAG
GAGGAGCCACATACATAACTCAGGCCTGCTTATCAACTTTCTACATGTTAATAATGACATCAGATCAATG
GGTGTTCTCAGCTTCTCAGAAGGAGGTCAAAATTCTCCCCCTCTCCCCTTCATGTGTCCAGACCTTCCCG
GATTTGGATGTACCAAGTGCAGAGTGGTGTTGAGGCCAAGGGGCTCATCCATGTAAGTCTCATCTGCAAT
CACTGGGCTGATCCCGTGGCCCTGTCTCCAGGGCGCCATCAGAGAGGGCTTCAATCCTCAGGTTACCTGT
GGCCCACCCTGCCCTCAGAGGTGCCATCTCTACATTGGCCACGAGATGGCAGCACATACTCATAGACTGC
ATTAATTTCCCAGCAACTCCTGGTGGGTTTTCCCTCTTATCAGGATGTTTGCCTTGCTCAGAGAGCAAAT
CTGAGAGCAGTGACACCTAACTTAACTTTCAGCAAAATATTTTGAGAAGGGTGCCCCTTTACACATCTGT
GCAGTCCAGGTGATGCATCCCATGCCCAATGCTCGGTAGTCAGGAGGAGCTTCCTCCATGCAGCTCTGCG
GAAGAGACTCTTCCACGCTGCTCATGTAAACTCCAGATTCGGTGTCAGTTTTCTGACACCGAAGACAATG
ATCTAAGTGCAGTCAAGGGCTTTGGGGAAAGCAGGAGAGAGTGCCTCAGTTCTAGCCTGTGCCATGCTTG
CAAAGTTTTGCAAAATTCTAATGAGAGCTGGGCTTGCAACATTGGAAACTTGGATTATTTGTGAGAGCAC
TGAGAAATCCCTGGGCATGTCCATCTGGAAAAACAGCATTTCCTCTGGCACTTTAGCAGAGGTTCTGTTT
CAATTTGGCGAAGGAAATTAAGCAGTTTTTCACAAAAGAAGAACTACAACGAGGAGAATTGTCCCTAGTA
TTTCTTCTCCCTAATTGTCAAGGAAGTGTAAATTAGAAAATGAATCAGGACAATTTCCACCTACTATGTT
AGCTAATATTTTAAAAATTGAATATCACAAGGGTGAGGCAAAGTAATTGTTTTCCAGTGACATTTTCCAC
TGTCACACCCTTTTAGAGAATAATTTGGCAATGTTACTGTGAGATAGAAATATGTCTATATAATTATGGG
AACTGAGACTTCAGAAAGTAATAAGGAATAAGAATGAAATTTATGAACAAACATGTGGAAGGTTGGAAGC
AAGAGTGGGGCCAACACGCATGGGGAGGAAGCATTTGGGCAGCGACTCCGCAGACCCAGACTCAAGCTGA
GCTATACAACCTCCTTACGCCTCAGTTTCCTCAACTGAAGAACAGGAATGACAAGTGCCTGTTTCATAGG
ACCGTTGTGAGGATTAAGTGAGATATACCACATTATGAGCTTGTGCCTGGAAAGGTTGATTCTTAGTAAA
TGATGACTATTCTTTTTTATTGCAATAAAATTTATACAACATAGAGTTACTATTTTAACCATTTTTGCAG
GTACCACTGAGTGGCATTCAGTACATTCACAATGGTGTGCAACCGTCACCATATTTCCAGGACATTTTTC
TCATCCCCAAAGGAAACCTCATGCCCATTAAGCAGTCACTCCTCATTAAAATATTAGTTATGAAGACTGT
AGCATTTTTTTAAAAACTCATGATATAACATTGATTGAAAAAATCAGTATAGGAAATTGTGCATTATGAT
GTAATAGTAAAAGAAGCATATAAAAATCTGAAAAAAGTATATAAAAAGAATAGCAATTGTATTTCTCAGA
CTCTCTTTACATTGTAAAAATCATTTTGATAGCTTCAAAAGAAAAGCAAAAAGTACACAAACAACAACCA
ACCCCAAAGCAGCATGACAAAGCCCAGATTGTTGAATCCAGGTCTTGGGAACATAAAATCTTATATGACA
TTTGCACTTTAATGGGTCAGAGAGTCCAGTGGCATTGGGAGCTGCCTTGTGTTCTGCAGCCTCACGGACA
GACAGGAGGTCCAGCTCCACTGCTCTGTTCTTCTGGAATTTCCTCGTGAACAAGCTTTGGCCTCAGTAAC
CATTTCTTTCATCTTTTTAAACACAGGTACCTTTGGGACTGGCCTTCTCAAGGAAGCCCAGCTCCTTGTT
ATTGAGAATGAAGTGTGCAATCACTATAAGTATATTTGTGCTGAGCATTTGGCCAGAGGCACTGACAGTT
GCCAGGTAAGAAAAGATCAATAGATCAAAGTCTTGTGCTCTCCCGTCTCAGTCTCAGTCCCTTAGACGTC
AGTCCCAAAGTGGCAAATTCAGGAAGGTTTTGTCAGTGGAAGACCCCAGTCTAAGTGTTGCTCAGAAACT
CCCCAGATCTGTCCCTGAATGCATATTCAGATCATCTAAGGAGACGTCTTGGGGCTTGAGTTCCAGATCC
ATAGCAAGGGAGCCGTAAGTGCCATAACTACCTCAGGCCACTCACCTTCCTGGTGTGTGCTGGTCACCAG
TGACTGAAGTGGTGGCTTTTCCAGTAGAGAGGAAGGTAGAGGGTACAGGACCGAGACAAATTACACACAC
TTAACAATGATGTCCAGGCTAGCCCAGTCTAAAGGAAACACCAAGTTAGGAAGCAATGCATGCAGGATTC
ACAAGGGATTATTTTTTTTCCCAGGAAAAAACTAAGTGATGTGGTTTTGTTGAATAGACTTTGCTAAGTA
CTTAAGCACTGCAGATGCTTGAGTAATATGCTCATAAGTTCCTTTCTGATTTGAATTACTGGGAAAATGT
ACATATGGATAAGAGAAGGATGGCATCCCATATTAAAAGGTTGGCAGCTTAAAGCTCACATGAATTTTCC
CCTACCTCTGTTTAGGGTGACAGTGGAGGGCCTCTGGTTTGCTTCGAGAAGGACAAATACATTTTACAAG
GAGTCACTTCTTGGGGTCTTGGCTGTGCACGCCCCAATAAGCCTGGTGTCTATGCTCGTGTTTCAAGGTT
TGTTACTTGGATTGAGGGAATGATGAGAAATAATTAATTGGACGGGAGACAGAGTGAAGCATCAACCTAC
TTAGAAGCTGAAACGTGGGTAAGGATTTAGCATGCTGGAAATAATAGACAGCAATCAAACGAAGACACTG
TTCCCAGCTACCAGCTATGCCAAACCTTGGCATTTTTGGTATTTTTGTGTATAAGCTTTTAAGGTCTGAC
TGACAAATTCTGTATTAAGGTGTCATAGCTATGACATTTGTTAAAAATAAACTCTGCACTTATTTTGATT
TGAA.

[0032] By “adenine” or “9H-Purin-6-amine” is meant a purine nucleobase with the molecular formula C₅H₅N₅, having the structure

[chemical structure]

and corresponding to CAS No. 73-24-5.

[0033] By “adenosine” or “4-Amino-1-[(2R,3R,4S,5R)-3,4-dihydroxy-5-(hydroxymethyl)oxolan-2-yl]pyrimidin-2(1H)-one” is meant an adenine molecule attached to a ribose sugar via a glycosidic bond, having the structure

[chemical structure]

and corresponding to CAS No. 65-46-3. Its molecular formula is C₁₀H₁₃N₅O₄.

[0034] By “adenosine deaminase” or “adenine deaminase” is meant a polypeptide or fragment thereof capable of catalyzing the hydrolytic deamination of adenine or adenosine. In some embodiments, the deaminase or deaminase domain is an adenosine deaminase catalyzing the hydrolytic deamination of adenosine to inosine or deoxy adenosine to deoxyinosine. In some embodiments, the adenosine deaminase catalyzes the hydrolytic deamination of adenine or adenosine in deoxyribonucleic acid (DNA). The adenosine deaminases (e.g., engineered adenosine deaminases, evolved adenosine deaminases) provided herein may be from any organism (e.g., eukaryotic, prokaryotic), including but not limited to algae, bacteria, fungi, plants, invertebrates (e.g., insects), and vertebrates (e.g., amphibians, mammals). In some embodiments, the adenosine deaminase is an adenosine deaminase variant with one or more alterations and is capable of deaminating both adenine and cytosine in a target polynucleotide (e.g., DNA, RNA) and may be referred to as a “dual deaminase”. Non-limiting examples of dual deaminases include those described in PCT/US22/22050. In some embodiments, the target polynucleotide is single or double stranded. In some embodiments, the adenosine deaminase variant is capable of deaminating both adenine and cytosine in DNA. In some embodiments, the adenosine deaminase variant is capable of deaminating both adenine and cytosine in single-stranded DNA. In some embodiments, the adenosine deaminase variant is capable of deaminating both adenine and cytosine in RNA. In embodiments, the adenosine deaminase variant is selected from those described in PCT/US2020/018192, PCT/US2020/049975, PCT/US2017/045381, PCT/US2021/016827, PCT/US2022/073781, PCT/US24/34189, or PCT/US2020/028568, the full contents of which are each incorporated herein by reference in their entireties for all purposes. Further non-limiting examples of adenosine deaminases include those disclosed or referenced in Rufflow, et al., “Design of highly functional genome editors by modeling of the universe of CRISPR-Cas Sequences,” bioRxiv, posted Apr. 22, 2024, doi: 10.1101/2024.04.22.590591, the disclosure of which is incorporated herein by reference in its entirety for all purposes, which were designed using artificial intelligence. Further exemplary adenosine deaminase amino acid sequences include: TadA-8e (SEQ ID NO: 470), Tad1 (SEQ ID NO: 471), Tad2 (SEQ ID NO: 472), Tad3 (SEQ ID NO: 473), Tad4 (SEQ ID NO: 474), Tad6 (SEQ ID NO: 475), Tad6-SR (SEQ ID NO: 476), TadA9 (SEQ ID NO: 477), TadA20 (SEQ ID NO: 478), Staphylococcus aureus TadA (SEQ ID NO: 479), Bacillus subtilis TadA (SEQ ID NO: 480), Salmonella typhimurium TadA (SEQ ID NO: 481), Shewanella putrefaciens (SEQ ID NO: 482), Haemophilus influenzae F3031 TadA (SEQ ID NO: 483), Caulobacter crescentus TadA (SEQ ID NO: 484), Geobacter sulfurreducens TadA (SEQ ID NO: 485), Streptococcus pyogenes TadA (SEQ ID NO: 486), Aquifex aeolicus TadA (SEQ ID NO: 487), and E. col TadA deaminase (ecTadA) (SEQ ID NO: 488).

[0035] By “adenosine deaminase activity” is meant catalyzing the deamination of adenine or adenosine to guanine in a polynucleotide.

[0036] By “Adenosine Base Editor (ABE)” is meant a base editor comprising an adenosine deaminase.

[0037] By “Adenosine Base Editor (ABE) polynucleotide” is meant a polynucleotide encoding an ABE.

[0038] By “Adenosine Base Editor 8 (ABE8) polypeptide” or “ABE8” is meant a base editor as defined herein comprising an adenosine deaminase or adenosine deaminase variant comprising one or more of the alterations listed in Table 5B, one of the combinations of alterations listed in Table 5B, or an alteration at one or more of the amino acid positions listed in Table 5B, where such alterations are relative to the following reference sequence: MSEVEFSHEYWMRHALTLAKRARDEREVPVGAVLVLNNRVIGEGWNRAIGLHDPTAHAEIMALR QGGLVMQNYRLIDATLYVTFEPCVMCAGAMIHSRIGRVVFGVRNAKTGAAGSLMDVLHYPGMNH RVEITEGILADECAALLCYFFRMPRQVFNAQKKAQSSTD (SEQ ID NO: 1), or a corresponding position in another adenosine deaminase. In embodiments, ABE8 comprises alterations at amino acids 82 and/or 166 of SEQ ID NO: 1. In some embodiments, ABE8 comprises further alterations, as described herein, relative to the reference sequence.

[0039] By “Adenosine Base Editor 8 (ABE8) polynucleotide” is meant a polynucleotide encoding an ABE8 polypeptide. “Administering” is referred to herein as providing one or more compositions described herein to a patient or a subject. By way of example and without limitation, composition administration (e.g., injection) can be performed by intravenous (i.v.) injection, sub-cutaneous (s.c.) injection, intradermal (i.d.) injection, intraperitoneal (i.p.) injection, or intramuscular (i.m.) injection. One or more such routes can be employed. Parenteral administration can be, for example, by bolus injection or by gradual perfusion over time. In some embodiments, parenteral administration includes infusing or injecting intravascularly, intravenously, intramuscularly, intraarterially, intrathecally, intratumorally, intradermally, intraperitoneally, transtracheally, subcutaneously, subcuticularly, intraarticularly, subcapsularly, subarachnoidly and intrastemally. Alternatively, or concurrently, administration can be by the oral route.

[0040] By “agent” is meant any small molecule chemical compound, antibody, nucleic acid molecule, polypeptide, or fragments thereof. In an embodiment, the agent is a base editor system described herein or a component thereof.

[0041] By “alteration” is meant a change in the level, structure, or activity of an analyte, gene or polypeptide as detected by standard art known methods such as those described herein. As used herein, an alteration includes a change (e.g., increase or reduction) in expression levels. In embodiments, the increase or reduction in expression levels is by 10%, 25%, 40%, 50% or greater. In some embodiments, an alteration includes an insertion, deletion, or substitution of a nucleobase or amino acid (by, e.g., genetic engineering).

[0042] By “ameliorate” is meant reduce, suppress, attenuate, diminish, arrest, or stabilize the development or progression of a disease. In embodiments, the disease is atherosclerosis or a cardiovascular disease. Editing of an LPa gene in a subject having atherosclerosis or a cardiovascular disease may ameliorate symptoms associated with the disease.

[0043] By “analog” is meant a molecule that is not identical but has analogous functional or structural features. For example, a polypeptide analog retains the biological activity of a corresponding naturally-occurring polypeptide, while having certain biochemical modifications that enhance the analog's function relative to a naturally occurring polypeptide. Such biochemical modifications could increase the analog's protease resistance, membrane permeability, or half-life, without altering, for example, ligand binding. An analog may include an unnatural amino acid.

[0044] By “base editor (BE),” or “nucleobase editor polypeptide (NBE)” is meant an agent that binds a polynucleotide and has nucleobase modifying activity. In various embodiments, the base editor comprises a nucleobase modifying polypeptide (e.g., a deaminase) and a polynucleotide programmable nucleotide binding domain (e.g., Cas9 or Cpf1). Representative nucleic acid and protein sequences of base editors include those sequences having about or at least about 85% sequence identity to any base editor sequence provided in the sequence listing, such as those corresponding to SEQ ID NOs: 2-11.

[0045] By “BE4 cytidine deaminase (BE4) polypeptide,” is meant a base editor comprising a nucleic acid programmable DNA binding protein (napDNAbp) domain, a cytidine deaminase domain, and two uracil glycosylase inhibitor domains (UGIs). In embodiments, the napDNAbp is a Cas9n (D10A) polypeptide. Non-limiting examples of cytidine deaminase domains include rAPOBEC, ppAPOBEC, RrA3F, AmAPOBEC1, and SsAPOBEC3B.

[0046] By “BE4 cytidine deaminase (BE4) polynucleotide,” is meant a polynucleotide encoding a BE4 polypeptide.

[0047] By “base editing activity” is meant acting to chemically alter a base within a polynucleotide. In one embodiment, a first base is converted to a second base. In one embodiment, the base editing activity is cytidine deaminase activity, e.g., converting target C·G to T·A. In another embodiment, the base editing activity is adenosine or adenine deaminase activity, e.g., converting A·T to G·C.

[0048] The term “base editor system” refers to an intermolecular complex for editing a nucleobase of a target nucleotide sequence. In various embodiments, the base editor (BE) system comprises (1) a polynucleotide programmable nucleotide binding domain, a deaminase domain (e.g., cytidine deaminase or adenosine deaminase) for deaminating nucleobases in the target nucleotide sequence; and (2) one or more guide polynucleotides (e.g., guide RNA) in conjunction with the polynucleotide programmable nucleotide binding domain. In various embodiments, the base editor (BE) system comprises a nucleobase editor domain selected from an adenosine deaminase or a cytidine deaminase, and a domain having nucleic acid sequence specific binding activity. In some embodiments, the base editor system comprises (1) a base editor (BE) comprising a polynucleotide programmable DNA binding domain and a deaminase domain for deaminating one or more nucleobases in a target nucleotide sequence; and (2) one or more guide RNAs in conjunction with the polynucleotide programmable DNA binding domain. In some embodiments, the polynucleotide programmable nucleotide binding domain is a polynucleotide programmable DNA binding domain. In some embodiments, the base editor is a cytidine base editor (CBE). In some embodiments, the base editor is an adenine or adenosine base editor (ABE). In some embodiments, the base editor is an adenine or adenosine base editor (ABE) or a cytidine or cytosine base editor (CBE). In some embodiments, the base editor system (e.g., a base editor system comprising a cytidine deaminase) comprises a uracil glycosylase inhibitor or other agent or peptide (e.g., a uracil stabilizing protein such as provided in WO2022015969, the disclosure of which is incorporated herein by reference in its entirety for all purposes) that inhibits the inosine base excision repair system.

[0049] The term “Cas9” or “Cas9 domain” refers to an RNA guided nuclease comprising a Cas9 protein, or a fragment thereof (e.g., a protein comprising an active, inactive, or partially active DNA cleavage domain of Cas9, and/or the gRNA binding domain of Cas9). A Cas9 nuclease is also referred to sometimes as a casnl nuclease or a CRISPR (clustered regularly interspaced short palindromic repeat) associated nuclease.

[0050] The term “conservative amino acid substitution” or “conservative mutation” refers to the replacement of one amino acid by another amino acid with a common property. A functional way to define common properties between individual amino acids is to analyze the normalized frequencies of amino acid changes between corresponding proteins of homologous organisms (Schulz, G. E. and Schirmer, R. H., Principles of Protein Structure, Springer-Verlag, New York (1979)). According to such analyses, groups of amino acids can be defined where amino acids within a group exchange preferentially with each other, and therefore resemble each other most in their impact on the overall protein structure (Schulz, G. E. and Schirmer, R. H., supra). Non-limiting examples of conservative mutations include amino acid substitutions of amino acids, for example, lysine for arginine and vice versa such that a positive charge can be maintained; glutamic acid for aspartic acid and vice versa such that a negative charge can be maintained; serine for threonine such that a free —OH can be maintained; and glutamine for asparagine such that a free —NH₂ can be maintained.

[0051] Amino acids generally can be grouped into classes according to the following common side-chain properties:
[0052] (1) hydrophobic: Norleucine, Met, Ala, Val, Leu, He;
[0053] (2) neutral hydrophilic: Cys, Ser, Thr, Asn, Gin;
[0054] (3) acidic: Asp, Glu;
[0055] (4) basic: His, Lys, Arg;
[0056] (5) residues that influence chain orientation: Gly, Pro;
[0057] (6) aromatic: Trp, Tyr, Phe.

[0058] In some embodiments, conservative substitutions can involve the exchange of a member of one of these classes for another member of the same class. In some embodiments, non-conservative amino acid substitutions can involve exchanging a member of one of these classes for another class.

[0059] The term “coding sequence” or “protein coding sequence” as used interchangeably herein refers to a segment of a polynucleotide that codes for a protein. Coding sequences can also be referred to as open reading frames. The region or sequence is bounded nearer the 5′ end by a start codon and nearer the 3′ end with a stop codon. Stop codons useful with the base editors described herein include the following: TAG, TAA, and TGA.

[0060] By “complex” is meant a combination of two or more molecules whose interaction relies on inter-molecular forces. Non-limiting examples of inter-molecular forces include covalent and non-covalent interactions. Non-limiting examples of non-covalent interactions include hydrogen bonding, ionic bonding, halogen bonding, hydrophobic bonding, van der Waals interactions (e.g., dipole-dipole interactions, dipole-induced dipole interactions, and London dispersion forces), and 7r-effects. In an embodiment, a complex comprises polypeptides, polynucleotides, or a combination of one or more polypeptides and one or more polynucleotides. In one embodiment, a complex comprises one or more polypeptides that associate to form a base editor (e.g., base editor comprising a nucleic acid programmable DNA binding protein, such as Cas9, and a deaminase) and a polynucleotide (e.g., a guide RNA). In an embodiment, the complex is held together by hydrogen bonds. It should be appreciated that one or more components of a base editor (e.g., a deaminase, or a nucleic acid programmable DNA binding protein) may associate covalently or non-covalently. As one example, a base editor may include a deaminase covalently linked to a nucleic acid programmable DNA binding protein (e.g., by a peptide bond). Alternatively, a base editor may include a deaminase and a nucleic acid programmable DNA binding protein that associate noncovalently (e.g., where one or more components of the base editor are supplied in trans and associate directly or via another molecule such as a protein or nucleic acid). In an embodiment, one or more components of the complex are held together by hydrogen bonds.

[0061] By “cytosine” or “4-Aminopyrimidin-2(1H)-one” is meant a purine nucleobase with the molecular formula C₄H₅N₃O, having the structure

[chemical structure]

and corresponding to CAS No. 71-30-7.

[0062] By “cytidine” is meant a cytosine molecule attached to a ribose sugar via a glycosidic bond, having the structure

[chemical structure]

and corresponding to CAS No. 65-46-3. Its molecular formula is C₉H₁₃N₃O₅.

[0063] By “Cytidine Base Editor (CBE)” is meant a base editor comprising a cytidine deaminase. Non-limiting examples of cytidine deaminase base editor amino acid sequences include amino acid sequences for BE4max (SEQ ID NO: 553), YE1-BE4 (SEQ ID NO: 554), YE2-BE4 (SEQ ID NO: 555), YEE-BE4 (SEQ ID NO: 556), EE-BE4 (SEQ ID NO: 557), R33A-BE4 (SEQ ID NO: 558), R33A+K34A-BE4 (SEQ ID NO: 559), APOBEC3A (A3A)-BE4 (SEQ ID NO: 560), APOBEC3B (A3B)-BE4 (SEQ ID NO: 561), APOBEC3G (A3G)-BE4 (SEQ ID NO: 562), AID-BE4 (SEQ ID NO: 563), CDA-BE4 (SEQ ID NO: 564), FERNY-BE4 (SEQ ID NO: 565), evolved APOBEC3A (eA3A)-BE4 (SEQ ID NO: 566), AALN-BE4 (SEQ ID NO: 567), BE4max modified with SpCas9-NG (SEQ ID NO: 568), YE1-SpCas9-NG (YE1-NG) (SEQ ID NO: 569), YE2-SpCas9-NG (SEQ ID NO: 570), YEE-SpCas9-NG (SEQ ID NO: 571), EE-SpCas9-NG (SEQ ID NO: 572), R33A+K34A-SpCas9-NG (SEQ ID NO: 573), YE1-CP1028 (YE1-BE4-CP1028, or YE1-CP) (SEQ ID NO: 574), YE2-CP1028 (YE2-BE4-CP1028) (SEQ ID NO: 575), YEE-CP1028 (YEE-BE4-CP1028) (SEQ ID NO: 576), EE-CP1028 (EE-BE4-CP1028) (SEQ ID NO: 577), R33A+K34A-CP1028 (R33A+K34A-BE4-CP1028) (SEQ ID NO: 578), BE4max (with nickase) (SEQ ID NO: 597), BE4 (SEQ ID NO: 598), BE4 with His tag (SEQ ID NO: 599), BE4max (SEQ ID NO: 600), AncBE4max 689 (SEQ ID NO: 601), and AncBE4max 687 (SEQ ID NO: 602).

[0064] By “Cytidine Base Editor (CBE) polynucleotide” is meant a polynucleotide encoding a CBE. Non-limiting examples of polynucleotide sequences encoding cytidine deaminase base editors include those encoding BE4max (SEQ ID NO: 616), AncBE4max689 (SEQ ID NO: 617), and AncBE4max687 (SEQ ID NO: 618).

[0065] By “cytidine deaminase” or “cytosine deaminase” is meant a polypeptide or fragment thereof capable of deaminating cytidine or cytosine. In embodiments, the cytidine or cytosine is present in a polynucleotide. In one embodiment, the cytidine deaminase converts cytosine to uracil or 5-methylcytosine to thymine. The terms “cytidine deaminase” and “cytosine deaminase” are used interchangeably throughout the application. Petromyzon marinus cytosine deaminase 1 (PmCDA1) (SEQ ID NO: 13-14), Activation-induced cytidine deaminase (AICDA) (SEQ ID NOs: 15-21), and APOBEC (SEQ ID NOs: 12-61) are exemplary cytidine deaminases. Further exemplary cytidine deaminase (CDA) sequences are provided in the Sequence Listing as SEQ ID NOs: 62-66 and SEQ ID NOs: 67-189. Non-limiting examples of cytidine deaminases include those described in PCT/US20/16288, PCT/US2018/021878, 180802-021804/PCT, PCT/US2018/048969, PCT/US2016/058344, PCT/US2020/062428, and PCT/US2019/033848, the disclosures of which are incorporated herein by reference in their entireties for all purposes.

[0066] Non-limiting examples of cytidine deaminase amino acid sequences include amino acid sequences for Rat APOBEC1 (SEQ ID NO: 579), Human APOBEC1 (SEQ ID NO: 580), Human APOBEC3 (SEQ ID NO: 581), Human APOBEC3B (SEQ ID NO: 582), Human APOBEC3G (SEQ ID NO: 583), evoAPOBEC3A(eA3A) (SEQ ID NO: 584), evoCDA (SEQ ID NO: 585), evoAPOBEC1 (SEQ ID NO: 586), YE1 (SEQ ID NO: 587), YE2 (SEQ ID NO: 588), YEE (SEQ ID NO: 589), EE (SEQ ID NO: 590), R33A (SEQ ID NO: 591), R33A+K34A (SEQ ID NO: 592), AALN (SEQ ID NO: 593), FERNY (SEQ ID NO: 594), evoFERNY (SEQ ID NO: 595), APOBEC (SEQ ID NO: 619), Anc686 APOBEC (SEQ ID NO: 620), Human APOBEC-3G D316R D317R (SEQ ID NO: 621), Human APOBEC-3G chain A (SEQ ID NO: 622), Human APOBEC3-G chain A D120R_D121R (SEQ ID NO: 623), Mouse APOBEC3 (SEQ ID NO: 624), Rat APOBEC3 (SEQ ID NO: 625), Rhesus macaque APOBEC-3G (SEQ ID NO: 626), Chimpanzee APOBEC-3G (SEQ ID NO: 627), Green Monkey APOBEC-3G (SEQ ID NO: 628), Human APOBEC-3G (SEQ ID NO: 629), Human APOBEC-3F (SEQ ID NO: 630), Human APOBEC-3B (SEQ ID NO: 631), Rat APOBEC-3B (SEQ ID NO: 632), Bovine APOBEC-3B (SEQ ID NO: 633), Chimpanzee APOBEC-3B (SEQ ID NO: 634), Gorilla APOBEC-3C (SEQ ID NO: 635), Human APOBEC-3A (SEQ ID NO: 636), Rhesus macaque APOBEC-3A (SEQ ID NO: 637), Bovine APOBEC-3A (SEQ ID NO: 638), Human APOBEC-3H (SEQ ID NO: 639), Human APOBEC-3D (SEQ ID NO: 640), Rat ABOPEC1 (SEQ ID NO: 641), Anc689 APOBEC (SEQ ID NO: 642), Anc687 APOBEC (SEQ ID NO: 643), Anc686 APOBEC (SEQ ID NO: 644), Anc655 APOBEC (SEQ ID NO: 645), and Anc733 APOBEC (SEQ ID NO: 646).

[0067] By “cytidine deaminase polynucleotide” is meant a polynucleotide encoding a cytidine deaminase. Non-limiting examples of polynucleotide sequences encoding cytidine deaminase domains include those encoding Rat APOBEC1 (SEQ ID NO: 604), Anc689 APOBEC (SEQ ID NO: 605), Anc687 APOBEC (SEQ ID NO: 606), Anc686 APOBEC (SEQ ID NO: 607), Anc655 APOBEC (SEQ ID NO: 608), Anc733 APOBEC (SEQ ID NO: 609), Rat APOBEC1 (SEQ ID NO: 610), Anc689 APOBEC (SEQ ID NO: 611), Anc687 APOBEC (SEQ ID NO: 612), Anc686 APOBEC (SEQ ID NO: 613), Anc655 APOBEC (SEQ ID NO: 614), and Anc733 APOBEC (SEQ ID NO: 615).

[0068] By “cytosine deaminase activity” is meant catalyzing the deamination of cytosine or cytidine. In one embodiment, a polypeptide having cytosine deaminase activity converts an amino group to a carbonyl group. In an embodiment, a cytosine deaminase converts cytosine to uracil (i.e., C to U) or 5-methylcytosine to thymine (i.e., 5mC to T). In some embodiments, a cytosine deaminase as provided herein has increased cytosine deaminase activity (e.g., at least 10-fold, 20-fold, 30-fold, 40-fold, 50-fold, 60-fold, 70-fold, 80-fold, 90-fold, 100-fold or more) relative to a reference cytosine deaminase.

[0069] The term “deaminase” or “deaminase domain,” as used herein, refers to a protein or fragment thereof that catalyzes a deamination reaction.

[0070] The term “detect” refers to identifying the presence, absence or amount of the analyte to be detected. In one embodiment, a sequence alteration in a polynucleotide or polypeptide is detected. In another embodiment, the presence of indels is detected. In one embodiment LPa is detected in the blood serum or a tissue of a subject.

[0071] By “detectable label” is meant a composition that when linked to a molecule of interest renders the latter detectable, via spectroscopic, photochemical, biochemical, immunochemical, or chemical means. For example, useful labels include radioactive isotopes, magnetic beads, metallic beads, colloidal particles, fluorescent dyes, electron-dense reagents, enzymes (for example, as commonly used in an enzyme linked immunosorbent assay (ELISA)), biotin, digoxigenin, or haptens.

[0072] By “disease” is meant any condition or disorder that damages or interferes with the normal function of a cell, tissue, or organ. Exemplary diseases include cardiovascular disease. Non-limiting examples of cardiovascular diseases include aortic stenosis, atherosclerotic cardiovascular disease (ASCVD), abnormal heart rhythms, or arrhythmias, aorta disease and Marfan syndrome, congenital heart disease, coronary artery disease (narrowing of the arteries), coronary heart disease (CHD), deep vein thrombosis and pulmonary embolism, heart attack, heart failure, heart muscle disease (cardiomyopathy), heart valve disease, pericardial disease, peripheral vascular disease, rheumatic heart disease, stroke, and vascular disease (blood vessel disease).

[0073] By “dual editing activity” or “dual deaminase activity” is meant having adenosine deaminase and cytidine deaminase activity. In one embodiment, a base editor having dual editing activity has both A→G and C→T activity, wherein the two activities are approximately equal or are within about 10% or 20% of each other. In another embodiment, a dual editor has A→G activity that no more than about 10% or 20% greater than C→T activity. In another embodiment, a dual editor has A→G activity that is no more than about 10% or 20% less than C→T activity.

[0074] In some embodiments, the adenosine deaminase variant has predominantly cytosine deaminase activity, and little, if any, adenosine deaminase activity. In some embodiments, the adenosine deaminase variant has cytosine deaminase activity, and no significant or no detectable adenosine deaminase activity. Non-limiting examples of proteins having dual deaminase activity include those described in International Patent Application Publications No. WO 2024/040083 and WO 2022/204574, the disclosures of which are hereby incorporated by reference in their entireties for all purposes.

[0075] By “effective amount” is meant the amount of an agent (e.g., a base editor, cell) as described herein, that is required to ameliorate the symptoms of a disease relative to an untreated patient or an individual without disease, i.e., a healthy individual, or is the amount of the agent sufficient to elicit a desired biological response. The effective amount of active compound(s) used to practice embodiments of the present disclosure for therapeutic treatment of a disease varies depending upon the manner of administration, the age, body weight, and general health of the subject. Ultimately, the attending physician or veterinarian will decide the appropriate amount and dosage regimen. Such amount is referred to as an “effective” amount. In one embodiment, an effective amount is the amount of a base editor of the disclosure sufficient to introduce an alteration in a gene of interest in a cell (e.g., a cell in vitro or in vivo). In one embodiment, an effective amount is the amount of a base editor required to achieve a therapeutic effect. Such therapeutic effect need not be sufficient to alter a pathogenic gene in all cells of a subject, tissue or organ, but only to alter the pathogenic gene in about 1%, 5%, 10%, 25%, 50%, 75% or more of the cells present in a subject, tissue or organ. In one embodiment, an effective amount is sufficient to ameliorate one or more symptoms of a disease. For example, an effective amount of a base editor system described herein is administered to a patient where the administration is associated with a decrease in serum concentrations of LPa in the patient.

[0076] The term “exonuclease” refers to a protein or polypeptide capable of removing successive nucleotides from either the 5′ or 3′ end of a polynucleotide.

[0077] The term “endonuclease” refers to a protein or polypeptide capable of catalyzing the cleavage of internal regions in a polynucleotide.

[0078] By “fragment” is meant a portion of a polypeptide or nucleic acid molecule. This portion contains, at least about 10%, 20%, 30%, 40%, 50%, 60%, 70%, 80%, or 90% of the entire length of the reference nucleic acid molecule or polypeptide. A fragment may contain 10, 20, 30, 40, 50, 60, 70, 80, 90, or 100, 200, 300, 400, 500, 600, 700, 800, 900, or 1000 nucleotides or amino acids. In some embodiments, the fragment is a functional fragment.

[0079] By “gene” is meant a polynucleotide sequence that is transcribed as a single unit.

[0080] By “guide polynucleotide” is meant a polynucleotide or polynucleotide complex which is specific for a target sequence and can form a complex with a polynucleotide programmable nucleotide binding domain protein (e.g., Cas9 or Cpf1). In an embodiment, the guide polynucleotide is a guide RNA (gRNA). gRNAs can exist as a complex of two or more RNAs, or as a single RNA molecule. “Hybridization” means hydrogen bonding, which may be Watson-Crick, Hoogsteen or reversed Hoogsteen hydrogen bonding, between complementary nucleobases. For example, adenine and thymine are complementary nucleobases that pair through the formation of hydrogen bonds.

[0081] By “increases” is meant a positive alteration of at least 10%, 25%, 50%, 75%, or 100%, or about 1.5 fold, about 2 fold, about 3-fold, about 4-fold, about 5-fold, about 6-fold, about 7-fold, about 8-fold, about 9-fold, about 10-fold, about 15-fold, about 20-fold, about 25-fold, about 30-fold, about 35-fold, about 40-fold, about 45-fold, about 50-fold, or about 100-fold.

[0082] The terms “inhibitor of base repair”, “base repair inhibitor”, “IBR” or their grammatical equivalents refer to a protein that is capable in inhibiting the activity of a nucleic acid repair enzyme, for example a base excision repair enzyme.

[0083] An “intein” is a fragment of a protein that is able to excise itself and join the remaining fragments (the exteins) with a peptide bond in a process known as protein splicing.

[0084] The terms “isolated,” “purified,” or “biologically pure” refer to material that is free to varying degrees from components which normally accompany it as found in its native state. “Isolate” denotes a degree of separation from original source or surroundings. “Purify” denotes a degree of separation that is higher than isolation. A “purified” or “biologically pure” protein is sufficiently free of other materials such that any impurities do not materially affect the biological properties of the protein or cause other adverse consequences. That is, a nucleic acid or peptide of this disclosure is purified if it is substantially free of cellular material, viral material, or culture medium when produced by recombinant DNA techniques, or chemical precursors or other chemicals when chemically synthesized. Purity and homogeneity are typically determined using analytical chemistry techniques, for example, polyacrylamide gel electrophoresis or high performance liquid chromatography. The term “purified” can denote that a nucleic acid or protein gives rise to essentially one band in an electrophoretic gel. For a protein that can be subjected to modifications, for example, phosphorylation or glycosylation, different modifications may give rise to different isolated proteins, which can be separately purified.

[0085] By “isolated polynucleotide” is meant a nucleic acid molecule that is free of the genes which, in the naturally-occurring genome of the organism from which the nucleic acid molecule of the disclosure is derived, flank the gene. The term therefore includes, for example, a recombinant DNA that is incorporated into a vector; into an autonomously replicating plasmid or virus; or into the genomic DNA of a prokaryote or eukaryote; or that exists as a separate molecule (for example, a cDNA or a genomic or cDNA fragment produced by PCR or restriction endonuclease digestion) independent of other sequences. In addition, the term includes an RNA molecule that is transcribed from a DNA molecule, as well as a recombinant DNA that is part of a hybrid gene encoding additional polypeptide sequence.

[0086] By an “isolated polypeptide” is meant a polypeptide of the disclosure that has been separated from components that naturally accompany it. Typically, the polypeptide is isolated when it is at least 60%, by weight, free from the proteins and naturally-occurring organic molecules with which it is naturally associated. In embodiments, the preparation is at least 75%, at least 90%, or at least 99%, by weight, a polypeptide of the disclosure. An isolated polypeptide of the disclosure may be obtained, for example, by extraction from a natural source, by expression of a recombinant nucleic acid encoding such a polypeptide; or by chemically synthesizing the protein. Purity can be measured by any appropriate method, for example, column chromatography, polyacrylamide gel electrophoresis, or by HPLC analysis.

[0087] The term “linker”, as used herein, refers to a molecule that links two moieties. In one embodiment, the term “linker” refers to a covalent linker (e.g., covalent bond) or a non-covalent linker.

[0088] By “marker” is meant any protein or polynucleotide having an alteration in expression, level, structure, or activity that is associated with a disease or disorder. In an embodiment, the level of LPa in a sample (e.g., blood, serum, plasma, tissue) is a marker of cardiovascular disease and/or atherosclerosis.

[0089] The term “mutation,” as used herein, refers to a substitution of a residue within a sequence, e.g., a nucleic acid or amino acid sequence, with another residue, or a deletion or insertion of one or more residues within a sequence. Mutations are typically described herein by identifying the original residue followed by the position of the residue within the sequence and by the identity of the newly substituted residue. Various methods for making the amino acid substitutions (mutations) provided herein are well known in the art, and are provided by, for example, Green and Sambrook, Molecular Cloning: A Laboratory Manual (4^{th} ed., Cold Spring Harbor Laboratory Press, Cold Spring Harbor, N.Y. (2012)).

[0090] The terms “nucleic acid” and “nucleic acid molecule,” as used herein, refer to a compound comprising a nucleobase and an acidic moiety, e.g., a nucleoside, a nucleotide, or a polymer of nucleotides. Typically, polymeric nucleic acids, e.g., nucleic acid molecules comprising three or more nucleotides are linear molecules, in which adjacent nucleotides are linked to each other via a phosphodiester linkage. In some embodiments, “nucleic acid” refers to individual nucleic acid residues (e.g., nucleotides and/or nucleosides). In some embodiments, “nucleic acid” refers to an oligonucleotide chain comprising three or more individual nucleotide residues. As used herein, the terms “oligonucleotide” and “polynucleotide” can be used interchangeably to refer to a polymer of nucleotides (e.g., a string of at least three nucleotides). In some embodiments, “nucleic acid” encompasses RNA as well as single and/or double-stranded DNA. Nucleic acids may be naturally occurring, for example, in the context of a genome, a transcript, an mRNA, tRNA, rRNA, siRNA, snRNA, a plasmid, cosmid, chromosome, chromatid, or other naturally occurring nucleic acid molecule. On the other hand, a nucleic acid molecule may be a non-naturally occurring molecule, e.g., a recombinant DNA or RNA, an artificial chromosome, an engineered genome, or fragment thereof, or a synthetic DNA, RNA, DNA/RNA hybrid, or including non-naturally occurring nucleotides or nucleosides.

[0091] Furthermore, the terms “nucleic acid,” “DNA,” “RNA,” and/or similar terms include nucleic acid analogs, e.g., analogs having other than a phosphodiester backbone. Nucleic acids can be purified from natural sources, produced using recombinant expression systems and optionally purified, chemically synthesized, etc. Where appropriate, e.g., in the case of chemically synthesized molecules, nucleic acids comprise nucleoside analogs such as analogs having chemically modified bases or sugars, and backbone modifications. A nucleic acid sequence is presented in the 5′ to 3′ direction unless otherwise indicated. In some embodiments, a nucleic acid is or comprises natural nucleosides (e.g. adenosine, thymidine, guanosine, cytidine, uridine, deoxyadenosine, deoxythymidine, deoxyguanosine, and deoxycytidine); nucleoside analogs (e.g., 2-aminoadenosine, 2-thiothymidine, inosine, pyrrolo-pyrimidine, 3-methyl adenosine, 5-methylcytidine, 2-aminoadenosine, C₅-bromouridine, C₅-fluorouridine, C₅-iodouridine, C₅-propynyl-uridine, C₅-propynyl-cytidine, C₅-methylcytidine, 2-aminoadenosine, 7-deazaadenosine, 7-deazaguanosine, 8-oxoadenosine, 8-oxoguanosine, 0(6)-methylguanine, and 2-thiocytidine); chemically modified bases; biologically modified bases (e.g., methylated bases); intercalated bases; modified sugars (e.g., 2′-fluororibose, ribose, 2′-deoxyribose, arabinose, and hexose); and/or modified phosphate groups (e.g., phosphorothioates and 5′-N-phosphoramidite linkages).

[0092] The term “nuclear localization sequence,” “nuclear localization signal,” or “NLS” refers to an amino acid sequence that promotes import of a protein into the cell nucleus. Nuclear localization sequences are known in the art and described, for example, in Plank et al., International PCT application, PCT/EP2000/011690, filed Nov. 23, 2000, published as WO/2001/038547 on May 31, 2001, the contents of which are incorporated herein by reference for their disclosure of exemplary nuclear localization sequences. In other embodiments, the NLS is an optimized NLS described, for example, by Koblan et al., Nature Biotech. 2018 doi:10.1038/nbt.4172. In some embodiments, an NLS comprises the amino acid sequence

(SEQ ID NO: 190)
KRTADGSEFESPKKKRKV,
(SEQ ID NO: 191)
KRPAATKKAGQAKKKK,
(SEQ ID NO: 192)
KKTELQTTNAENKTKKL,
(SEQ ID NO: 193)
KRGINDRNFWRGENGRKTR,
(SEQ ID NO: 194)
RKSGKIAAIVVKRPRK,
(SEQ ID NO: 195)
PKKKRKV,
(SEQ ID NO: 196)
MDSLLMNRRKFLYQFKNVRWAKGRRETYLC,
(SEQ ID NO: 328)
PKKKRKVEGADKRTADGSEFESPKKKRKV,
or
(SEQ ID NO: 329)
RKSGKIAAIVVKRPRKPKKKRKV.

[0093] The term “nucleobase,” “nitrogenous base,” or “base,” used interchangeably herein, refers to a nitrogen-containing biological compound that forms a nucleoside, which in turn is a component of a nucleotide. The ability of nucleobases to form base pairs and to stack one upon another leads directly to long-chain helical structures such as ribonucleic acid (RNA) and deoxyribonucleic acid (DNA). Five nucleobases—adenine (A), cytosine (C), guanine (G), thymine (T), and uracil (U)—are called primary or canonical. Adenine and guanine are derived from purine, and cytosine, uracil, and thymine are derived from pyrimidine. DNA and RNA can also contain other (non-primary) bases that are modified. Non-limiting exemplary modified nucleobases can include hypoxanthine, xanthine, 7-methylguanine, 5,6-dihydrouracil, 5-methylcytosine (m5C), and 5-hydromethylcytosine. Hypoxanthine and xanthine can be created through mutagen presence, both of them through deamination (replacement of the amine group with a carbonyl group). Hypoxanthine can be modified from adenine. Xanthine can be modified from guanine. Uracil can result from deamination of cytosine. A “nucleoside” consists of a nucleobase and a five carbon sugar (either ribose or deoxyribose). Examples of a nucleoside include adenosine, guanosine, uridine, cytidine, 5-methyluridine (m5U), deoxyadenosine, deoxyguanosine, thymidine, deoxyuridine, and deoxycytidine. Examples of a nucleoside with a modified nucleobase includes inosine (I), xanthosine (X), 7-methylguanosine (m7G), dihydrouridine (D), 5-methylcytidine (m5C), and pseudouridine (Ψ). A “nucleotide” consists of a nucleobase, a five carbon sugar (either ribose or deoxyribose), and at least one phosphate group. Non-limiting examples of modified nucleobases and/or chemical modifications that a modified nucleobase may include are the following: pseudo-uridine, 5-Methyl-cytosine, 2′-O-methyl-3′-phosphonoacetate, 2′-O-methyl thioPACE (MSP), 2′-O-methyl-PACE (MP), 2′-fluoro RNA (2′-F-RNA), constrained ethyl (S-cEt), 2′-O-methyl (‘M’), 2′-O-methyl-3′-phosphorothioate (‘MS’), 2′-O-methyl-3′-thiophosphonoacetate (‘MSP’), 5-methoxyuridine, phosphorothioate, and NI-Methylpseudouridine.

[0094] The term “nucleic acid programmable DNA binding protein” or “napDNAbp” may be used interchangeably with “polynucleotide programmable nucleotide binding domain” to refer to a protein that associates with a nucleic acid (e.g., DNA or RNA), such as a guide nucleic acid or guide polynucleotide (e.g., gRNA), that guides the napDNAbp to a specific nucleic acid sequence. In some embodiments, the polynucleotide programmable nucleotide binding domain is a polynucleotide programmable DNA binding domain. In some embodiments, the polynucleotide programmable nucleotide binding domain is a polynucleotide programmable RNA binding domain. In some embodiments, the polynucleotide programmable nucleotide binding domain is a Cas9 protein. A Cas9 protein can associate with a guide RNA that guides the Cas9 protein to a specific DNA sequence that is complementary to the guide RNA. In some embodiments, the napDNAbp is a Cas9 domain, for example a nuclease active Cas9, a Cas9 nickase (nCas9), or a nuclease inactive Cas9 (dCas9). Non-limiting examples of nucleic acid programmable DNA binding proteins include, Cas9 (e.g., dCas9 and nCas9), Cas12a/Cpf1, Cas12b/C2cl, Cas12c/C2c3, Cas12d/CasY, Cas12e/CasX, Cas12g, Cas12h, Cas12i, and Cas12j/CasΦ (Cas12j/Casphi). Non-limiting examples of Cas enzymes include Cas1, Cas1B, Cas2, Cas3, Cas4, Cas5, Cas5d, Cas5t, Cas5h, Cas5a, Cas6, Cas7, Cas8, Cas8a, Cas8b, Cas8c, Cas9 (also known as Csn1 or Csx12), Cas10, Cas10d, Cas12a/Cpf1, Cas12b/C2cl, Cas12c/C2c3, Cas12d/CasY, Cas12e/CasX, Cas12g, Cas12h, Cas12i, Cas12j/CasD, Cpf1, Csy1, Csy2, Csy3, Csy4, Cse1, Cse2, Cse3, Cse4, Cse5e, Csc1, Csc2, Csa5, Csn1, Csn2, Csm1, Csm2, Csm3, Csm4, Csm5, Csm6, Cmr1, Cmr3, Cmr4, Cmr5, Cmr6, Csb1, Csb2, Csb3, Csx17, Csx14, Csx10, Csx16, CsaX, Csx3, Csx1, Csx1S, Csx11, Csf1, Csf2, CsO, Csf4, Csd1, Csd2, Cst1, Cst2, Csh1, Csh2, Csa1, Csa2, Csa3, Csa4, Csa5, Type II Cas effector proteins, Type V Cas effector proteins, Type VI Cas effector proteins, CARF, DinG, homologues thereof, or modified or engineered versions thereof. Other nucleic acid programmable DNA binding proteins are also within the scope of this disclosure, although they may not be specifically listed in this disclosure. See, e.g., Makarova et al. “Classification and Nomenclature of CRISPR-Cas Systems: Where from Here?” CRISPR J. 2018 October;1:325-336. doi: 10.1089/crispr.2018.0033; Yan et al., “Functionally diverse type V CRISPR-Cas systems” Science. 2019 Jan. 4; 363(6422):88-91. doi: 10.1126/science.aav7271, the entire contents of each are hereby incorporated by reference. Exemplary nucleic acid programmable DNA binding proteins and nucleic acid sequences encoding nucleic acid programmable DNA binding proteins are provided in the Sequence Listing as SEQ ID NOs: 197-231, 232-245, 254-257, 260, and 378. In some embodiments, the napDNAbp is a (CRISPR-associated system) Cas9 endonuclease, for example, Cas9 (Csn1) from Streptococcus pyogenes (e.g., SEQ ID NO: 197), Cas9 from Neisseria meningitidis (NmeCas9; SEQ ID NO: 208), Nme2Cas9 (SEQ ID NO: 209), Streptococcus constellatus (ScoCas9), or derivatives thereof (e.g., a sequence with at least about 85% sequence identity to a Cas9, such as Nme2Cas9 or spCas9). Further non-limiting examples of nucleic acid programmable DNA binding proteins include those disclosed or referenced in Rufflow, et al., “Design of highly functional genome editors by modeling of the universe of CRISPR-Cas Sequences,” bioRxiv, posted Apr. 22, 2024, doi: 10.1101/2024.04.22.590591, the disclosure of which is incorporated herein by reference in its entirety for all purposes, which were designed using artificial intelligence. In some embodiments, the napDNAbp is OpenCRISPR-1, or a variant thereof (e.g., a variant comprising a D10A amino acid alteration and/or lacking an N-terminal methionine). Further non-limiting examples of nucleic acid programmable DNA binding proteins include those disclosed in International Patent Application No. PCT/US2019/047996.

[0095] The terms “nucleobase editing domain” or “nucleobase editing protein,” as used herein, refers to a protein or enzyme that can catalyze a nucleobase modification in RNA or DNA, such as cytosine (or cytidine) to uracil (or uridine) or thymine (or thymidine), and adenine (or adenosine) to hypoxanthine (or inosine) deaminations, as well as non-templated nucleotide additions and insertions. In some embodiments, the nucleobase editing domain is a deaminase domain (e.g., an adenine deaminase or an adenosine deaminase; or a cytidine deaminase or a cytosine deaminase).

[0096] As used herein, “obtaining” as in “obtaining an agent” includes synthesizing, purchasing, or otherwise acquiring the agent.

[0097] By “OpenCRISPR-1 polypeptide” is meant a protein with an amino acid sequence having at least about 85% amino acid sequence identity to SEQ ID NO: 463, or a fragment thereof that associates with a nucleic acid, such as a guide nucleic acid or guide polynucleotide, that guides the napDNAbp to a specific nucleic acid sequence. Further details relating to the OpenCRISPR-1 polypeptide are disclosed in Rufflow, et al., “Design of highly functional genome editors by modeling of the universe of CRISPR-Cas Sequences,” bioRxiv, posted Apr. 22, 2024, doi: 10.1101/2024.04.22.590591, the disclosure of which is incorporated herein by reference in its entirety for all purposes.

[0098] By “OpenCRISPR-1 polynucleotide” is meant a nucleic acid molecule encoding an OpenCRISPR-1 polypeptide, as well as the introns, exons, 3′ untranslated regions, 5′ untranslated regions, and regulatory sequences associated with its expression, or fragments thereof. In embodiments, an OpenCRISPR-1 polynucleotide is the genomic sequence, cDNA, mRNA, or gene associated with and/or required for OpenCRISPR-1 expression. An exemplary OpenCRISPR-1 nucleotide sequence is provided at SEQ ID NO: 464.

[0099] In various embodiments, a guide RNA suitable for use in combination with an OpenCRISPR-1 polypeptide contains a scaffold having at least 85% sequence identity to a nucleotide sequence selected from the following, or fragments thereof capable of binding to an OpenCRISPR-1 polypeptide:

(SEQ ID NO: 465)
GUUUUAGAGCUGUGUUGAAAAACACAGCAAGUUAAAAUAAGGCUUUGUC
CGUAUCCAACUUGAAAAAGUGAGCACCGAUUCGGUGC;
(SEQ ID NO: 466)
GUUUUAGAGCUGGAAACAGCAAGUUAAAAUAAGGCUUUGUCCGUAUCCA
ACUUGAAAAAGUGAGCACCGAUUCGGUGC;
and
(SEQ ID NO: 467)
GUUUUAGAGCUAGAAAUAGCAAGUUAAAAUAAGGCUAGUCCGUUAUCAA
CUUGAAAAAGUGGCACCGAGUCGGUGC.

[0100] By “subject” or “patient” is meant a mammal, including, but not limited to, a human or non-human mammal. In embodiments, the mammal is a bovine, equine, canine, ovine, rabbit, rodent, nonhuman primate, or feline. In an embodiment, “patient” refers to a mammalian subject with a higher than average likelihood of developing a disease or a disorder. Exemplary patients can be humans, non-human primates, cats, dogs, pigs, cattle, cats, horses, camels, llamas, goats, sheep, rodents (e.g., mice, rabbits, rats, or guinea pigs) and other mammalians that can benefit from the therapies disclosed herein. Exemplary human patients can be male and/or female. “Patient in need thereof” or “subject in need thereof” is referred to herein as a patient diagnosed with, at risk or having, predetermined to have, or suspected of having a disease or disorder.

[0101] The terms “pathogenic mutation”, “pathogenic variant”, “disease causing mutation”, “disease causing variant”, “deleterious mutation”, or “predisposing mutation” refers to a genetic alteration or mutation that is associated with a disease or disorder or that increases an individual's susceptibility or predisposition to a certain disease or disorder. In some embodiments, the pathogenic mutation comprises at least one wild-type amino acid substituted by at least one pathogenic amino acid in a protein encoded by a gene. In some embodiments, the pathogenic mutation is in a terminating region (e.g., stop codon). In some embodiments, the pathogenic mutation is in a non-coding region (e.g., intron, promoter, etc.).

[0102] The terms “protein”, “peptide”, “polypeptide”, and their grammatical equivalents are used interchangeably herein, and refer to a polymer of amino acid residues linked together by peptide (amide) bonds. A protein, peptide, or polypeptide can be naturally occurring, recombinant, or synthetic, or any combination thereof.

[0103] The term “fusion protein” as used herein refers to a hybrid polypeptide which comprises protein domains from at least two different proteins.

[0104] The term “recombinant” as used herein in the context of proteins or nucleic acids refers to proteins or nucleic acids that do not occur in nature but are the product of human engineering.

[0105] For example, in some embodiments, a recombinant protein or nucleic acid molecule comprises an amino acid or nucleotide sequence that comprises at least one, at least two, at least three, at least four, at least five, at least six, or at least seven mutations as compared to any naturally occurring sequence.

[0106] By “reduces” is meant a negative alteration of at least 10%, 25%, 50%, 75%, or 100%. In embodiments, administration of a base editor system of the disclosure to a subject is associated with a reduction in serum levels of LPa in the subject and/or a reduced incidence of coronary heart disease in the subject.

[0107] By “reference” is meant a standard or control condition. In an embodiment, the reference is the level of LPa present in the blood of a subject not having a cardiovascular disease or atherosclerosis or having a low incidence of cardiovascular disease. In another embodiment, the reference is the level of LPa present in the blood of a subject having a cardiovascular disease or atherosclerosis or having an elevated risk for developing a cardiovascular disease. In another embodiment, a reference is an unedited cell. Another example of a reference is a base editor system lacking one or more alterations or one or more components of a base editor system of interest. In an embodiment, a reference is a base editor system containing a base editor polypeptide, or one or more polynucleotide encoding the same, and/or guide polynucleotide, or a polynucleotide encoding the same, that differs from that of a base editor system of interest. In one embodiment, the reference is a wild-type or healthy cell. In other embodiments and without limitation, a reference is an untreated cell that is not subjected to a test condition, or is subjected to placebo or normal saline, medium, buffer, and/or a control vector that does not harbor a polynucleotide of interest.

[0108] A “reference sequence” is a defined sequence used as a basis for sequence comparison. A reference sequence may be a subset of or the entirety of a specified sequence; for example, a segment of a full-length cDNA or gene sequence, or the complete cDNA or gene sequence. For polypeptides, the length of the reference polypeptide sequence will generally be at least about 16 amino acids, at least about 20 amino acids, at least about 25 amino acids, about 35 amino acids, about 50 amino acids, or about 100 amino acids. For nucleic acids, the length of the reference nucleic acid sequence will generally be at least about 50 nucleotides, at least about 60 nucleotides, at least about 75 nucleotides, about 100 nucleotides or about 300 nucleotides or any integer thereabout or therebetween. In some embodiments, a reference sequence is a wild-type sequence of a protein of interest. In other embodiments, a reference sequence is a polynucleotide sequence encoding a wild-type protein.

[0109] The term “RNA-programmable nuclease,” and “RNA-guided nuclease” refer to a nuclease that forms a complex with (e.g., binds or associates with) one or more RNA(s) that is not a target for cleavage. In some embodiments, an RNA-programmable nuclease, when in a complex with an RNA, may be referred to as a nuclease-RNA complex. Typically, the bound RNA(s) is referred to as a guide RNA (gRNA).

[0110] The term “single nucleotide polymorphism (SNP)” refers to a variation in a single nucleotide that occurs at a specific position in the genome, where each variation is present to some appreciable degree within a population (e.g., >1%). SNPs can fall within coding regions of genes, non-coding regions of genes, or in the intergenic regions (regions between genes). In some embodiments, SNPs within a coding sequence do not necessarily change the amino acid sequence of the protein that is produced, due to degeneracy of the genetic code. SNPs in the coding region are of two types: synonymous and nonsynonymous SNPs. Synonymous SNPs do not affect the protein sequence, while nonsynonymous SNPs change the amino acid sequence of protein. The nonsynonymous SNPs are of two types: missense and nonsense. SNPs that are not in protein-coding regions can still affect gene splicing, transcription factor binding, messenger RNA degradation, or the sequence of noncoding RNA. Gene expression affected by this type of SNP is referred to as an eSNP (expression SNP) and can be upstream or downstream from the gene. A single nucleotide variant (SNV) is a variation in a single nucleotide without any limitations of frequency and can arise in somatic cells. A somatic single nucleotide variation can also be called a single-nucleotide alteration.

[0111] By “specifically binds” is meant a nucleic acid molecule, polypeptide, polypeptide/polynucleotide complex, compound, or molecule that recognizes and binds a polypeptide and/or nucleic acid molecule of the disclosure, but which does not substantially recognize and bind other molecules in a sample, for example, a biological sample.

[0112] By “substantially identical” is meant a polypeptide or nucleic acid molecule exhibiting at least 50% identity to a reference amino acid sequence. In one embodiment, a reference sequence is a wild-type amino acid or nucleic acid sequence. In another embodiment, a reference sequence is any one of the amino acid or nucleic acid sequences described herein. In one embodiment, such a sequence is at least about 60%, 80%, 85%, 90%, 95%, 96%, 97%, 98%, 99%, 99.9%, or even 99.99%, identical at the amino acid level or nucleic acid level to the sequence used for comparison.

[0113] Sequence identity is typically measured using sequence analysis software (for example, Sequence Analysis Software Package of the Genetics Computer Group, University of Wisconsin Biotechnology Center, 1710 University Avenue, Madison, Wis. 53705, BLAST, BESTFIT, GAP, or PILEUP/PRETTYBOX programs). Such software matches identical or similar sequences by assigning degrees of homology to various substitutions, deletions, and/or other modifications. Conservative substitutions typically include substitutions within the following groups: glycine, alanine; valine, isoleucine, leucine; aspartic acid, glutamic acid, asparagine, glutamine; serine, threonine; lysine, arginine; and phenylalanine, tyrosine.

[0114] Nucleic acid molecules useful in the methods of the disclosure include any nucleic acid molecule that encodes a polypeptide of the disclosure or a functional fragment thereof. Such nucleic acid molecules need not be 100% identical with an endogenous nucleic acid sequence but will typically exhibit substantial identity. Polynucleotides having “substantial identity” to an endogenous sequence are typically capable of hybridizing with at least one strand of a double-stranded nucleic acid molecule. Nucleic acid molecules useful in the methods of the disclosure include any nucleic acid molecule that encodes a polypeptide of the disclosure or a functional fragment thereof. Such nucleic acid molecules need not be 100% identical with an endogenous nucleic acid sequence but will typically exhibit substantial identity. Polynucleotides having “substantial identity” to an endogenous sequence are typically capable of hybridizing with at least one strand of a double-stranded nucleic acid molecule. By “hybridize” is meant pair to form a double-stranded molecule between complementary polynucleotide sequences (e.g., a gene described herein), or portions thereof, under various conditions of stringency. (See, e.g., Wahl, G. M. and S. L. Berger (1987) Methods Enzymol. 152:399; Kimmel, A. R. (1987) Methods Enzymol. 152:507).

[0115] By “split” is meant divided into two or more fragments.

[0116] A “split polypeptide” or “split protein” refers to a protein that is provided as an N-terminal fragment and a C-terminal fragment translated as two separate polypeptides from a nucleotide sequence(s). The polypeptides corresponding to the N-terminal portion and the C-terminal portion of the split protein may be spliced in some embodiments to form a “reconstituted” protein. In embodiments, the split polypeptide is a nucleic acid programmable DNA binding protein (e.g. a Cas9) or a base editor.

[0117] The term “target site” refers to a nucleotide sequence or nucleobase of interest within a nucleic acid molecule that is modified. In embodiments, the modification is deamination of a base. The deaminase can be a cytidine or an adenine deaminase. The fusion protein or base editing complex comprising a deaminase may comprise a dCas9-adenosine deaminase fusion protein, a Cas12b-adenosine deaminase fusion, or a base editor disclosed herein.

[0118] As used herein, the terms “treat,” treating,” “treatment,” and the like refer to reducing or ameliorating a disorder and/or symptoms associated therewith or obtaining a desired pharmacologic and/or physiologic effect. It will be appreciated that, although not precluded, treating a disorder or condition does not require that the disorder, condition or symptoms associated therewith be completely eliminated. In some embodiments, the effect is therapeutic, i.e., without limitation, the effect partially or completely reduces, diminishes, abrogates, abates, alleviates, reduces the intensity of, or cures a disease and/or adverse symptom attributable to the disease. In some embodiments, the effect is preventative, i.e., the effect protects or prevents an occurrence or reoccurrence of a disease or condition. To this end, the presently disclosed methods comprise administering a therapeutically effective amount of a composition as described herein.

[0119] By “uracil glycosylase inhibitor” or “UGI” is meant an agent that inhibits the uracil-excision repair system. Base editors comprising a cytidine deaminase convert cytosine to uracil, which is then converted to thymine through DNA replication or repair. In various embodiments, a uracil DNA glycosylase (UGI) prevent base excision repair which changes the U back to a C. In some instances, contacting a cell and/or polynucleotide with a UGI and a base editor prevents base excision repair which changes the U back to a C. An exemplary UGI comprises an amino acid sequence as follows:

>splP14739IUNGI_BPPB2 Uracil-DNA glycosylase
inhibitor
(SEQ ID NO: 231)
MTNLSDIIEKETGKQLVIQESILMLPEEVEEVIGNKPESDILVHTAYDE
STDENVMLLTSDAPEYKPWALVIQDSNGENKIKML.

[0120] In some embodiments, the agent inhibiting the uracil-excision repair system is a uracil stabilizing protein (USP). See, e.g., WO 2022015969 Al, incorporated herein by reference.

[0121] As used herein, the term “vector” refers to a means of introducing a nucleic acid molecule into a cell, resulting in a transformed cell. Vectors include plasmids, transposons, phages, viruses, liposomes, lipid nanoparticles, and episomes.

[0122] Ranges provided herein are understood to be shorthand for all of the values within the range. For example, a range of 1 to 50 is understood to include any number, combination of numbers, or sub-range from the group consisting 1, 2, 3, 4, 5, 6, 7, 8, 9, 10, 11, 12, 13, 14, 15, 16, 17, 18, 19, 20, 21, 22, 23, 24, 25, 26, 27, 28, 29, 30, 31, 32, 33, 34, 35, 36, 37, 38, 39, 40, 41, 42, 43, 44, 45, 46, 47, 48, 49, or 50.

[0123] The recitation of a listing of chemical groups in any definition of a variable herein includes definitions of that variable as any single group or combination of listed groups. The recitation of an embodiment for a variable or aspect herein includes that embodiment as any single embodiment or in combination with any other embodiments or portions thereof.

[0124] All terms are intended to be understood as they would be understood by a person skilled in the art. Unless defined otherwise, all technical and scientific terms used herein have the same meaning as commonly understood by one of ordinary skill in the art to which the disclosure pertains.

[0125] In this application, the use of the singular includes the plural unless specifically stated otherwise. It must be noted that, as used in the specification, the singular forms “a,” “an” and “the” include plural referents unless the context clearly dictates otherwise. In this application, the use of “or” means “and/or” unless stated otherwise. Furthermore, use of the term “including” as well as other forms, such as “include”, “includes,” and “included,” is not limiting.

[0126] As used in this specification and claim(s), the words “comprising” (and any form of comprising, such as “comprise” and “comprises”), “having” (and any form of having, such as “have” and “has”), “including” (and any form of including, such as “includes” and “include”) or “containing” (and any form of containing, such as “contains” and “contain”) are inclusive or open-ended. This wording indicates that specified elements, features, components, and/or method steps are present, but does not exclude the presence of other elements, features, components, and/or method steps. Any embodiments specified as “comprising” a particular component(s) or element(s) are also contemplated as “consisting of” or “consisting essentially of” the particular component(s) or element(s) in some embodiments. It is contemplated that any embodiment discussed in this specification can be implemented with respect to any method or composition of the present disclosure, and vice versa. Furthermore, compositions of the present disclosure can be used to achieve methods of the present disclosure.

[0127] The term “about” or “approximately” means within an acceptable error range for the particular value as determined by one of ordinary skill in the art, which will depend in part on how the value is measured or determined, i.e., the limitations of the measurement system.

[0128] Reference in the specification to “some embodiments,” “an embodiment,” “one embodiment” or “other embodiments” means that a particular feature, structure, or characteristic described in connection with the embodiments is included in at least some embodiments, but not necessarily all embodiments, of the present disclosures.

### BRIEF DESCRIPTION OF THE DRAWINGS

[0129] FIG. 1 provides a schematic diagram showing LP(a) structure, properties, regulation, and relation to disease. Lipoprotein(a) [LP(a)]contains a lipid-rich domain, primarily cholesteryl esters, and apolipoprotein(a) [apo(a)]. Apo(a) binds to apolipoprotein B100 (apoB) via a single disulfide bond (a) at a location close the low-density lipoprotein receptor binding site of apoB (b). Apo(a) contains repeated kringle (K) structures (KIV and KV), comparable with those in plasminogen. There are 10 different subtypes of apo(a) KIV, where type 2 is present in multiple copies, resulting in a highly variable molecular mass (300-800 kDa). Apo(a) is compositionally unique among apolipoproteins with a high carbohydrate content (z28%). Proinflammatory and proatherogenic oxidized phospholipids bind to apo(a) KIV type 10 (c) and can also be found in the lipid phase. Apo(a) contains a protease domain (d) that lacks enzymatic activity. The Lp(a) concentration is heterogeneous and, to a major extent, controlled by genetics, inversely related to the copy number variation in the LPA gene. Other factors such as ethnicity and race and medical and environmental conditions also play roles in Lp(a) regulation. Lp(a) has been associated with increased risks of atherosclerosis, thrombosis, and aortic valve calcification.

[0130] FIG. 2 provides a schematic diagram showing single nucleotide polymorphisms (SNPs) reported to modify Lp(a) concentrations, including multiple variants in the KIV-2 region. The exons are numbered according to the domain that they encode (1-10: KIV-1 to KIV-10, L. leader sequence, P. protease domain, 5′: 5′ UTR, 3′: 3′ UTR). For orientation, three exons carry a superscript that reports the exon number in the genome sequence hg38. SNPs that have been associated with higher Lp(a) concentrations are shown above the gene structure. SNPs that have been associated with lower Lp(a) are shown below. SNPs that prevent protein production completely (null alleles) are underlined. FIG. 2 is taken from Coassin and Kronenberg, Atherosclerosis 349:17-35, 2022 (doi.org/10.1016/j.atherosclerosis.2022.04.003), the disclosure of which is incorporated herein by reference in its entirety for all purposes.

[0131] FIG. 3 provides a violin plot showing the distribution of serum LP(a) concentrations (mg/dL) in subjects containing 0, 1, or 2 (see x-axis) LP(a) polynucleotide variants containing the SNP chr6:160532610:A>G.

[0132] FIG. 4 provides a plot showing maximum C to T or A to G base editing frequencies measured in HEK293T cells transfected with the indicated base editor systems. In FIG. 4, the following notation is used to identify each base editor system indicated along the x-axis: the first term preceding the hyphen (“-”) indicates the guide polynucleotide of the base editor system (e.g., gRNA3512), the term “ABE” or “CBE” indicates that the base editor was an “adenosine deaminase base editor” or a “cytidine deaminase base editor,” respectively, and the last term, which follows the final underscore (“_”), indicates the PAM sequence recognized by the nucleic acid programmable DNA binding protein (napDNAbp) domain of the base editor (e.g., “NGG,” where “N” indicates A, C, T, or G). The guide polynucleotides of the base editor systems of FIG. 4 targeted the base editors to effect the introduction of a stop codon or to disrupt a splice site in an LPA polynucleotide in the HEK293T cells.

[0133] FIG. 5 provides a plot showing maximum C to T or A to G base editing frequencies measured in HEK293T cells transfected with the indicated base editor systems. In FIG. 5, the following notation is used to identify each base editor system indicated along the x-axis: the first term preceding the hyphen (“-”) indicates the guide polynucleotide of the base editor system (e.g., gRNA3420), ABE or CBE indicate that the base editor was an “adenosine deaminase base editor” or a “cytidine deaminase base editor,” respectively, and the last term, which follows the final underscore (“_”) indicates the PAM sequence recognized by the nucleic acid programmable DNA binding protein (napDNAbp) domain of the base editor (e.g., “NNNRRT,” where “N” indicates A, C, T, or G, and where “R” is A or G). The guide polynucleotides of the base editor systems of FIG. 5 targeted the base editors to effect the introduction of a stop codon or to disrupt a splice site in an LPA polynucleotide in the HEK293T cells.

### DETAILED DESCRIPTION

[0134] Provided herein are base editors and guide RNAs (gRNAs) for use in editing, modifying, or altering a target polynucleotide. In particular embodiments, a base editor of the present disclosure modifies an LPA polynucleotide. In particular embodiments, a base editor of the disclosure introduces a stop codon, protective SNP, missense mutation, or indel (e.g., a 1, 2, 3, 4, 5, 6, 7, 8, 9, or 10-nucleotide acid insertion or deletion (indel)) alteration in an LPA polynucleotide, or disrupts a splice site in the LPA polynucleotide. In embodiments, the alterations are associated with a reduction in activity or levels of an LPA polypeptide and/or polynucleotide in a cell. In some embodiments, the alterations are associated with reduced incidence of atherosclerotic cardiovascular disease (ASCVD) in a subject. In some cases, the alterations are associated with a reduction in incidence of heart attack, stroke, and/or aortic stenosis in a subject.

[0135] The various aspects and embodiments of the disclosure are based, at least in part, upon the discovery that base editing (e.g., disruption of splice acceptor or splice donor, or introduction of a stop codon, missense mutation, or indel alteration) can be used to reduce the expression of a LPA polypeptide associated with cardiovascular disease or to introduce to an LPA polypeptide single nucleotide polymorphisms (SNPs) to an LPA polynucleotide that were previously found to be associated with reduced risk of cardiovascular disease in a subject. In particular, reducing activity and/or expression of the LPA polypeptide or introducing protective SNPs to the polynucleotide encoding the LPA polypeptide in a subject diagnosed with or having a propensity to develop cardiovascular disease can be an effective treatment strategy. This reduction in activity and/or expression or introduction of an SNP can be effected using any of the base editing systems and methods provided herein. Accordingly, the disclosure features compositions and methods for editing an LPA polynucleotide. The edit to the LPA polynucleotide is associated with a reduction in expression of an LPA polypeptide in a cell of a subject and/or a reduction in symptoms associated with cardiovascular disease. In some embodiments, the edit to the LPA polynucleotide is associated with a reduction in LPA concentrations in the blood of a subject. In some instances, the LPA concentrations are reduced by about or at least about 10%, 15%, 20%, 25%, 30%, 35%, 40%, 45%, 50%, 55%, 60%, 65%, 70%, 75%, or 80%. In some embodiments, the LPA concentrations are reduced to less than 100 mg/dL, 90 mg/dL, 80 mg/dL, 70 mg/dL, 60 mg/dL, 50 mg/dL, 40 mg/dL, 30 mg/dL, or 20 mg/dL.

[0136] In embodiments, the methods of the present disclosure include disrupting splicing of an LPA polynucleotide transcript. For example, the base editors or base editor systems provided herein can be used for editing a nucleobase in the splice acceptor situated 5′ of an exon of the LPA polynucleotide. In some embodiments, the target sequence is a splice acceptor in the intron of an intron sequence adjacent to an exon of the LPA polynucleotide and is associated with a change in the splice acceptor compared to a wild-type splice acceptor. In some embodiments, the deamination of an A or C nucleobase in the splice acceptor results in disruption of splicing of the mRNA transcript during transcription. In some embodiments, the subject has or has the potential to develop cardiovascular disease.

[0137] In some instances, the methods of the present disclosure include modifying an LPA polynucleotide to introduce a stop codon, indel, or missense mutation associated with a reduction in levels or activity of the LPA polynucleotide and/or polypeptide. The alterations can be effected by a base editor system, such as those described herein.

[0138] In some cases, the methods of the present disclosure include modifying an LPA polynucleotide to introduce a single nucleotide polymorphism (SNP) known to be associated with reduced incidence of cardiovascular disease in a subject. Such SNPs may be referred to as protective alterations or variants of LPA. Non-limiting examples of such SNPs include missense variants of i significantly associated with decreased serum LPA concentrations in the United Kingdom Biobank (UKBB) (n=10) or null alleles shown previously to be associated with decreased serum LPA concentrations (n=10). In some cases, a variant may require a transversion alteration, however the corresponding transition variant may have a similar effect on serum LPA concentrations. Non-limiting examples of SNPs associated with reduced incidence of cardiovascular disease in a subject are listed in FIG. 2. Non-limiting examples of protective variants of LPA are listed in Table 8.

[0139] In some embodiments, the present disclosure provides base editors or nucleases that efficiently generate an intended mutation, such as a point mutation or indel, in a nucleic acid molecule (e.g., a nucleic acid within a genome of a subject) without generating a significant number of unintended mutations, such as unintended point mutations. In some embodiments, an intended mutation is a mutation that is generated by a specific base editor (e.g., an adenosine base editor or a cytidine base editor) bound to a guide polynucleotide (e.g., gRNA), specifically designed to generate the intended mutation. In some embodiments, the intended mutation is an adenine (A) to guanine (G) point mutation within the non-coding region of a gene. In some embodiments, the intended mutation is a cytosine (C) to thymine (T) point mutation within the non-coding region of a gene. In some embodiments, the intended mutation is a mutation of a splice acceptor in the non-coding region 5′ of an exon of a gene associated with a disease or disorder. In some instances, the intended mutation is an indel mutation. In some embodiments, the intended mutation is an adenine (A) to guanine (G) point mutation in the splice acceptor in the non-coding region 5′ of an exon of a gene associated with a disease or disorder. In some embodiments, the intended mutation is a missense mutation. The intended mutation can include the introduction of a stop codon to a polynucleotide sequence. In some embodiments, the intended mutation is a mutation that disrupts normal splicing of a complete transcript of a gene, for example, an A to G change in the splice acceptor within the non-coding region located 5′ of an exon of a disease-causing or a disease-associated gene. In some embodiments, the intended mutation is a mutation in the splice acceptor that disrupts splicing of a gene transcript and results in an alternative transcript that encodes a truncated and/or nonfunctional protein product. In some embodiments, the intended mutation is an SNP known to be associated with a reduction in incidence of cardiovascular disease in a subject.

[0140] In some embodiments, any of the base editors provided herein are capable of generating a ratio of intended mutations to unintended mutations (e.g., intended point mutations:unintended point mutations) that is greater than 1:1. In some embodiments, any of the base editors provided herein are capable of generating a ratio of intended mutations to unintended mutations (e.g., intended point mutations:unintended point mutations) that is at least 1.5:1, at least 2:1, at least 2.5:1, at least 3:1, at least 3.5:1, at least 4:1, at least 4.5:1, at least 5:1, at least 5.5:1, at least 6:1, at least 6.5:1, at least 7:1, at least 7.5:1, at least 8:1, at least 10:1, at least 12:1, at least 15:1, at least 20:1, at least 25:1, at least 30:1, at least 40:1, at least 50:1, at least 100:1, at least 150:1, at least 200:1, at least 250:1, at least 500:1, or at least 1000:1, or more.

[0141] In some embodiments, editing of a plurality of nucleobase pairs in one or more genes using the methods provided herein results in formation of at least one intended mutation. In some embodiments, the formation of the at least one intended mutation is in the splice acceptor 5′ of an exon of a disease-associated gene and results in disruption of splicing of the mRNA transcript of a disease-associated gene. It should be appreciated that multiplex editing can be accomplished using any method or combination of methods provided herein.

[0142] The present disclosure provides methods for the treatment of a subject diagnosed with a cardiovascular disease. For example, in some embodiments, a method is provided that comprises administering to a subject having or having a propensity to develop a cardiovascular disease, an effective amount of a nucleobase editor (e.g., an adenosine deaminase base editor or a cytidine deaminase base editor) to effect an alteration in an LPA polynucleotide sequence.

### Cardiovascular Disease

[0143] Cardiovascular disease (CVD) encompasses a group of disorders of the heart and blood vessels. In many instances, CVD is associated with an increase in atherosclerosis. CVD associated diseases include coronary heart disease—a disease of the blood vessels supplying the heart muscle; cerebrovascular disease—a disease of the blood vessels supplying the brain; peripheral arterial disease—a disease of blood vessels supplying the arms and legs; rheumatic heart disease—damage to the heart muscle and heart valves from rheumatic fever, caused by streptococcal bacteria; congenital heart disease—birth defects that affect the normal development and functioning of the heart caused by malformations of the heart structure from birth; and deep vein thrombosis and pulmonary embolism—blood clots in the leg veins, which can dislodge and move to the heart and lungs. Heart attacks and strokes are usually acute events and are mainly caused by a blockage that prevents blood from flowing to the heart or brain. The most common reason for this is a build-up of fatty deposits on the inner walls of the blood vessels that supply the heart or brain. Strokes can be caused by bleeding from a blood vessel in the brain or from blood clots.

[0144] Symptoms of a heart attack include: pain or discomfort in the center of the chest; and/or pain or discomfort in the arms, the left shoulder, elbows, jaw, or back.

[0145] Symptoms of stroke include: sudden weakness of the face, arm, or leg, most often on one side of the body, numbness of the face, arm, or leg, especially on one side of the body, confusion, difficulty speaking or understanding speech, difficulty seeing with one or both eyes, difficulty walking, dizziness and/or loss of balance or coordination, severe headache with no known cause, and fainting or unconsciousness.

[0146] Rheumatic heart disease is caused by damage to the heart valves and heart muscle from the inflammation and scarring caused by rheumatic fever. Rheumatic fever is caused by an abnormal response of the body to infection with streptococcal bacteria, which usually begins as a sore throat or tonsillitis in children. Symptoms of rheumatic heart disease include: shortness of breath, fatigue, irregular heartbeats, chest pain and fainting.

[0147] Human genetic studies have indicated that plasma lipoprotein(a) (LPA) is causally associated with the risk of cardiovascular disease.

### Lipoprotein(a)

[0148] Lipoprotein(a) (LPA) is a lipoprotein that has emerged as an independent risk factor for developing vascular disease (see, e.g., FIG. 1). A number of SNPs reported to modify LPA concentrations are shown in FIG. 2. Plasma LPA levels above the common cut-off level of 300 mg/L place individuals at risk of developing heart disease, particularly if combined with other lipid and thrombogenic risk factors. In general, LPA levels have proven challenging to regulate. LPA has a high affinity for arterial walls and displays many athero-thrombogenic properties. Ongoing research continues to highlight the clinical importance of LPA in connection with cardiovascular disease. A review of LPA biology is provided by McCormick Clin Biochem Rev. 2004 February; 25(1): 69-80, which is incorporated herein in its entirety.

[0149] Elevated LPA levels increase the risk of atherosclerotic cardiovascular disease (ASCVD) in a subject. Increased lipoprotein(a) (LPA) can lead to heart attack, stroke, and aortic stenosis. About 1.4 billion people globally have elevated LP(a) levels, described as greater than about 50 mg/dL, and possibly higher in patients with established ASCVD. Elevated LPA levels can occur in patients with otherwise normal lipid levels. A UK Biobank analysis supported the current American College of Cardiology/American Heart Association cholesterol and primary prevention guidelines' recommendation to use Lp(a) as a risk-enhancing factor that, if measured, would favor statin initiation among individuals at borderline (5%-7.4%) or intermediate (7.5%-19.9%) 10-year predicted risk for ASCVD.

### Editing of Target Genes

[0150] Exemplary guide RNA sequences that can be used to produce the polynucleotide edits described above (e.g., missense mutations, stop codons, indel mutations, introduction of single nucleotide polymorphisms, splice-site disruption mutations, etc.) are listed in Tables 1A-1 to 1C-2 below. To produce the polynucleotide edits, cells (e.g., cells in or from a subject, such as hepatocytes) of a subject are contacted with one or more guide RNAs containing one or more of the spacer sequences listed in Tables 1A-2, 1B-2, or 1C-2 below, or fragments thereof, and an endonuclease or a nucleobase editor polypeptide or complex containing a nucleic acid programmable DNA binding protein (napDNAbp) and a cytidine deaminase or adenosine deaminase. In embodiments, the base editor and/or endonuclease is introduced to the cell using a polynucleotide sequence (e.g., mRNA) encoding the base editor, such as a base editor having an amino acid sequence selected from those listed in Table 2, or an amino acid sequence having at least about 85%, 90%, 95%, 99%, or greater sequence identity to a sequence listed in Table 2 or a fragment thereof (e.g., an adenosine deaminase domain or napDNAbp domain). Tables 1A-1, 1B-1, and 1C-1 below list representative guide RNA sequences that can be used in combination with the indicated editors (e.g., endonucleases or base editors). The guide polynucleotide sequences listed in Tables 1A-1, 1B-1, and 1C-1 correspond to and contain the spacer sequences listed in Tables 1A-2, 1B-2 and 1C-2, respectively, and can be used to target the target sequences listed in Tables 1A-2, 1B-2 and 1C-2 to effect the edits listed in Tables 1A-2, 1B-2 and 1C-2. In some embodiments, the gRNA comprises nucleotide analogs. These nucleotide analogs can inhibit degradation of the gRNA from cellular processes. Tables 1A-2, 1B-2, and 1C-2 list target sequences to be used for gRNAs. Further exemplary spacer sequences suitable for use in gRNA sequences for use in the methods provided herein include fragments of any of the spacers listed in Tables 1A-2, 1B-2, and 1C-2 as well as any of the spacers provided in Tables 1A-2, 1B-2, and 1C-2 modified to include an extension or truncation at the 3′ and/or 5′ end(s). In embodiments, a spacer sequence of Tables 1A-2, 1B-2, and 1C-2 can be modified to include a 1, 2, 3, 4, 5, 6, 7, 8, 9, or 10 nucleotide extension or truncation at the 3′ and/or 5′ end(s).

[0151] In various instances, it is advantageous for a spacer sequence to include a 5′ and/or a 3′ “G” nucleotide. In some cases, for example, any spacer sequence or guide polynucleotide provided herein comprises or further comprises a 5′ “G”, where, in some embodiments, the 5′ “G” is or is not complementary to a target sequence. In some embodiments, the 5′ “G” is added to a spacer sequence that does not already contain a 5′ “G.” For example, it can be advantageous for a guide RNA to include a 5′ terminal “G” when the guide RNA is expressed under the control of a U6 promoter or the like because the U6 promoter prefers a “G” at the transcription start site (see Cong, L. et al. “Multiplex genome engineering using CRISPR/Cas systems. Science 339:819-823 (2013) doi: 10.1126/science.1231143). In some cases, a 5′ terminal “G” is added to a guide polynucleotide that is to be expressed under the control of a promoter but is optionally not added to the guide polynucleotide if or when the guide polynucleotide is not expressed under the control of a promoter.

[0152] Variants of the spacer sequences of the disclosure comprising 1, 2, 3, 4, or 5 nucleobase alterations are contemplated. For example, variation of a target polynucleotide sequence within a population (e.g., single nucleotide polymorphisms) may require said alterations to a spacer sequence to allow the spacer to better bind a variant of a target sequence in a subject.

[0153] Exemplary guide polynucleotide sequences are provided below in Tables 1A-1 to 1C-2 and exemplary base editor sequences are provided in Table 2.

[0154] In the below tables, “mN” indicates a 2′-OMe modification of the nucleotide “N”, and “Ns” indicates that the nucleotide “N” is linked to the following (i.e., 3′) nucleotide by a phosphorothioate (PS).

TABLE 1A-1
Exemplary guide polynucleotide sequences for use in targeting a base editor to
introduce a single nucleotide polymorphism (SNP) to an LPA polynucleotide. In
embodiments, the SNP is associated with a reduction in incidence of cardiovascular disease
in a subject. In some cases, the SNP is associated with a reduction in serum concentrations
of LPA in a subject and/or in a reduction in risk for coronary heart disease (CHD).

| | | SEQ |
|---|---|---|
| Guide Name | Guide polynucleotide sequence | ID NO |
| CBE_NGA_20nt_4-9_006_- | mCsmAsmCsUGGCAUCAGAGGACCCCGUUUUAGAGCUAGA | 445 |
| 160577150_spCas9 | AAUAGCAAGUUAAAAUAAGGCUAGUCCGUUAUCAACUUGA | |
| | AAAAGUGGCACCGAGUCGGUGCmUsmUsmUsU | |
| CBE_NG_20nt_4-9_028_- | mCsmAsmCsUGGCAUCAGAGGACCCCGUUUUAGAGCUAGA | 446 |
| 160577151_spCas9 | AAUAGCAAGUUAAAAUAAGGCUAGUCCGUUAUCAACUUGA | |
| | AAAAGUGGCACCGAGUCGGUGCmUsmUsmUsU | |
| CBE_NGA_20nt_3-16_035_- | mCsmAsmCsUGGCAUCAGAGGACCCCGUUUUAGAGCUAGA | 447 |
| 160577150_spCas9 | AAUAGCAAGUUAAAAUAAGGCUAGUCCGUUAUCAACUUGA | |
| | AAAAGUGGCACCGAGUCGGUGCmUsmUsmUsU | |
| CBE_NRCH_20nt_3- | mGsmGsmCAUCAGAGGACCCCAGAAGUUUUAGAGCUAGA | 448 |
| 9_030_−_160577145_spCas9 | AAUAGCAAGUUAAAAUAAGGCUAGUCCGUUAUCAACUUGA | |
| | AAAAGUGGCACCGAGUCGGUGCmUsmUsmUsU | |
| CBE_NGG_20nt_3-16_033_- | mUsmGsmAsUACCACACUGGCAUCAGGUUUUAGAGCUAGA | 449 |
| 160577158_SpCas9 | AAUAGCAAGUUAAAAUAAGGCUAGUCCGUUAUCAACUUGA | |
| | AAAAGUGGCACCGAGUCGGUGCmUsmUsmUsU | |
| CBE_NGA_20nt_3-16_035_- | mGsmAsmUsACCACACUGGCAUCAGAGUUUUAGAGCUAGA | 450 |
| 160577157_spCas9 | AAUAGCAAGUUAAAAUAAGGCUAGUCCGUUAUCAACUUGA | |
| | AAAAGUGGCACCGAGUCGGUGCmUsmUsmUsU | |
| CBE_NGA_20nt_4- | mGsmGsmGsCUUUUCUCAGGUGGUGCGUUUUAGAGCUAGA | 451 |
| 9_006_+_160577276_spCas9 | AAUAGCAAGUUAAAAUAAGGCUAGUCCGUUAUCAACUUGA | |
| | AAAAGUGGCACCGAGUCGGUGCmUsmUsmUsU | |
| CBE_NG_20nt_4- | mGsmGsmGsCUUUUCUCAGGUGGUGCGUUUUAGAGCUAGA | 452 |
| 9_028_+_160577276_spCas9 | AAUAGCAAGUUAAAAUAAGGCUAGUCCGUUAUCAACUUGA | |
| | AAAAGUGGCACCGAGUCGGUGCmUsmUsmUsU | |
| CBE_NGA_20nt_3- | mGsmGsmGsCUUUUCUCAGGUGGUGCGUUUUAGAGCUAGA | 453 |
| 16_035_+_160577276_spCas9 | AAUAGCAAGUUAAAAUAAGGCUAGUCCGUUAUCAACUUGA | |
| | AAAAGUGGCACCGAGUCGGUGCmUsmUsmUsU | |
| CBE_NGC_20nt_4- | mAsmCsmAsGGGCUUUUCUCAGGUGGGUUUUAGAGCUAGA | 454 |
| 9_009_+_160577273_spCas9 | AAUAGCAAGUUAAAAUAAGGCUAGUCCGUUAUCAACUUGA | |
| | AAAAGUGGCACCGAGUCGGUGCmUsmUsmUSU | |
| CBE_NG_20nt_4- | mAsmCsmAsGGGCUUUUCUCAGGUGGGUUUUAGAGCUAGA | 455 |
| 9_028_+_160577273_spCas9 | AAUAGCAAGUUAAAAUAAGGCUAGUCCGUUAUCAACUUGA | |
| | AAAAGUGGCACCGAGUCGGUGCmUsmUsmUsU | |
| CBE_NRCH_20nt_3- | mAsmCsmAsGGGCUUUUCUCAGGUGGGUUUUAGAGCUAGA | 456 |
| 9_030_+_160577273_spCas9 | AAUAGCAAGUUAAAAUAAGGCUAGUCCGUUAUCAACUUGA | |
| | AAAAGUGGCACCGAGUCGGUGCmUsmUsmUsU | |
| CBE_NNNRRT_21nt_3- | mAsmGsmGsGCUUUUCUCAGGUGGUGCGUUUUAGUACUCU | 457 |
| 12_015_+_160577275_saCas9 | GUAAUGAAAAUUACAGAAUCUACUAAAACAAGGCAAAAUG | |
| | CCGUGUUUAUCUCGUCAACUUGUUGGCGAGAUsmUsmUsm | |
| | U | |
| CBE_NG_20nt_4- | mCsmCsmAsCAGGGCUUUUCUCAGGUGUUUUAGAGCUAGA | 458 |
| 9_028_+_160577271_spCas9 | AAUAGCAAGUUAAAAUAAGGCUAGUCCGUUAUCAACUUGA | |
| | AAAAGUGGCACCGAGUCGGUGCmUsmUsmUsU | |
| CBE_NGG_20nt_3- | mUsmGsmGsACCACAGGGCUUUUCUCGUUUUAGAGCUAGA | 459 |
| 16_033_+_160577267_SpCas9 | AAUAGCAAGUUAAAAUAAGGCUAGUCCGUUAUCAACUUGA | |
| | AAAAGUGGCACCGAGUCGGUGCmUsmUsmUsU | |
| CBE_NGG_0nt_3- | mAsmCsmCsACAGGGCUUUUCUCAGGGUUUUAGAGCUAGA | 460 |
| 16_033_+_160577270_SpCas9 | AAUAGCAAGUUAAAAUAAGGCUAGUCCGUUAUCAACUUGA | |
| | AAAAGUGGCACCGAGUCGGUGCmUsmUsmUsU | |
| ABE_NGA_20nt_3-9_005_−_ | mCsmAsmCsUGGCAUCAGAGAACCACGUUUUAGAGCUAGA | 461 |
| 160589567_spCas9 | AAUAGCAAGUUAAAAUAAGGCUAGUCCGUUAUCAACUUGA | |
| | AAAAGUGGCACCGAGUCGGUGCmUsmUsmUsU | |
| ABE_NG_20nt_3-9_027_−_ | mCsmAsmCsUGGCAUCAGAGAACCACGUUUUAGAGCUAGA | 462 |
| 160589568_spCas9 | AAUAGCAAGUUAAAAUAAGGCUAGUCCGUUAUCAACUUGA | |
| | AAAAGUGGCACCGAGUCGGUGCmUsmUsmUsU | |
| ABE_NGA_20nt_3- | mCsmAsmCsUGGCAUCAGAGAACCACGUUUUAGAGCUAGA | 647 |
| 12_019_−_160589567_spCas9 | AAUAGCAAGUUAAAAUAAGGCUAGUCCGUUAUCAACUUGA | |
| | AAAAGUGGCACCGAGUCGGUGCmUsmUsmUsU | |
| ABE_NNGRRT_21nt_5- | mCsmAsmCsACUGGCAUCAGAGAACCAGUUUUAGUACUCU | 648 |
| 14_011_−_160589565_saCas9 | GUAAUGAAAAUUACAGAAUCUACUAAAACAAGGCAAAAUG | |
| | CCGUGUUUAUCUCGUCAACUUGUUGGCGAGAUsmUsmUsm | |
| | U | |
| ABE_NRCH_20nt_3- | mGsmGsmCsAUCAGAGAACCACAGAAGUUUUAGAGCUAGA | 649 |
| 9_024_−_160589562_spCas9 | AAUAGCAAGUUAAAAUAAGGCUAGUCCGUUAUCAACUUGA | |
| | AAAAGUGGCACCGAGUCGGUGCmUsmUsmUsU | |
| ABE_NGA_20nt_13- | mUsmGsmAsCACCACACUGGCAUCAGGUUUUAGAGCUAGA | 650 |
| 16_034_−_160589575_SpCas9 | AAUAGCAAGUUAAAAUAAGGCUAGUCCGUUAUCAACUUGA | |
| | AAAAGUGGCACCGAGUCGGUGCmUsmUsmUsU | |
| CBE_NGA_20nt_4-9_006_−_ | mUsmAsmCsUGCCGUAACCCUGAUGGGUUUUAGAGCUAGA | 651 |
| 160545510_spCas9 | AAUAGCAAGUUAAAAUAAGGCUAGUCCGUUAUCAACUUGA | |
| | AAAAGUGGCACCGAGUCGGUGCmUsmUsmUsU | |
| CBE_NG_20nt_4-9_028-_ | mUsmAsmCsUGCCGUAACCCUGAUGGGUUUUAGAGCUAGA | 652 |
| 160545511_spCas9 | AAUAGCAAGUUAAAAUAAGGCUAGUCCGUUAUCAACUUGA | |
| | AAAAGUGGCACCGAGUCGGUGCmUsmUsmUsU | |
| CBE_NGA_20nt_3-16_035-_ | mUsmAsmCsUGCCGUAACCCUGAUGGGUUUUAGAGCUAGA | 653 |
| 160545510_spCas9 | AAUAGCAAGUUAAAAUAAGGCUAGUCCGUUAUCAACUUGA | |
| | AAAAGUGGCACCGAGUCGGUGCmUsmUsmUsU | |
| CBE_NNNRRT 21nt_3- | mUsmGsmCsCGUAACCCUGAUGGUGACGUUUUAGUACUCU | 654 |
| 12_015_−_160545503_saCas9 | GUAAUGAAAAUUACAGAAUCUACUAAAACAAGGCAAAAUG | |
| | CCGUGUUUAUCUCGUCAACUUGUUGGCGAGAUsmUsmUsm | |
| | U | |
| CBE_NG_20nt_4-9_028_−_ | mAsmGsmUsACUGCCGUAACCCUGAUGUUUUAGAGCUAGA | 655 |
| 160545513_spCas9 | AAUAGCAAGUUAAAAUAAGGCUAGUCCGUUAUCAACUUGA | |
| | AAAAGUGGCACCGAGUCGGUGCmUsmUsmUsU | |
| CBE_NRCH_20nt_3- | mAsmCsmUsGCCGUAACCCUGAUGGUGUUUUAGAGCUAGA | 656 |
| 9_030_−_160545508_spCas9 | AAUAGCAAGUUAAAAUAAGGCUAGUCCGUUAUCAACUUGA | |
| | AAAAGUGGCACCGAGUCGGUGCmUsmUsmUsU | |
| CBE_NGG_20nt_3-16_033_−_ | mCsmAsmGsUACUGCCGUAACCCUGAGUUUUAGAGCUAGA | 657 |
| 160545513_SpCas9 | AAUAGCAAGUUAAAAUAAGGCUAGUCCGUUAUCAACUUGA | |
| | AAAAGUGGCACCGAGUCGGUGCmUsmUsmUsU | |
| CBE_NGA_20nt_3-16_035_−_ | mUsmUsmUsCAGUACUGCCGUAACCCGUUUUAGAGCUAGA | 658 |
| 160545516_spCas9 | AAUAGCAAGUUAAAAUAAGGCUAGUCCGUUAUCAACUUGA | |
| | AAAAGUGGCACCGAGUCGGUGCmUsmUsmUsU | |
| CBE_NGG_20nt_4-9_003_−_ | mGsmGsmCsUCCUUCCGAACAAGGUAGUUUUAGAGCUAGA | 659 |
| 160635116_spCas9 | AAUAGCAAGUUAAAAUAAGGCUAGUCCGUUAUCAACUUGA | |
| | AAAAGUGGCACCGAGUCGGUGCmUsmUsmUsU | |
| CBE_NG_20nt_4-9_028_−_ | mGsmGsmCsUCCUUCCGAACAAGGUAGUUUUAGAGCUAGA | 660 |
| 160635117_spCas9 | AAUAGCAAGUUAAAAUAAGGCUAGUCCGUUAUCAACUUGA | |
| | AAAAGUGGCACCGAGUCGGUGCmUsmUsmUsU | |
| CBE_NGG_20nt_3-16_033_−_ | mGsmGsmCsUCCUUCCGAACAAGGUAGUUUUAGAGCUAGA | 661 |
| 160635116_SpCas9 | AAUAGCAAGUUAAAAUAAGGCUAGUCCGUUAUCAACUUGA | |
| | AAAAGUGGCACCGAGUCGGUGCmUsmUsmUsU | |
| CBE_NGG_20nt_4-9_003_−_ | mGsmGsmCsUCCUUCCGAACAAGGUAGUUUUAGAGCUAGA | 662 |
| 160635116_spCas9 | AAUAGCAAGUUAAAAUAAGGCUAGUCCGUUAUCAACUUGA | |
| | AAAAGUGGCACCGAGUCGGUGCmUsmUsmUsU | |
| CBE_NG_20nt_4-9_028_−_ | mGsmGsmCsUCCUUCCGAACAAGGUAGUUUUAGAGCUAGA | 663 |
| 160635117_spCas9 | AAUAGCAAGUUAAAAUAAGGCUAGUCCGUUAUCAACUUGA | |
| | AAAAGUGGCACCGAGUCGGUGCmUsmUsmUsU | |
| CBE_NGG_20nt_3-16_033_−_ | mGsmGsmCsUCCUUCCGAACAAGGUAGUUUUAGAGCUAGA | 664 |
| 160635116_SpCas9 | AAUAGCAAGUUAAAAUAAGGCUAGUCCGUUAUCAACUUGA | |
| | AAAAGUGGCACCGAGUCGGUGCmUsmUsmUsU | |
| CBE_NGA_20nt_4-9_006_−_ | mGsmCsmUsCCUUCCGAACAAGGUAAGUUUUAGAGCUAGA | 665 |
| 160635115_spCas9 | AAUAGCAAGUUAAAAUAAGGCUAGUCCGUUAUCAACUUGA | |
| | AAAAGUGGCACCGAGUCGGUGCmUsmUsmUsU | |
| CBE_NG_20nt_4-9 028_−_ | mGsmCsmUsCCUUCCGAACAAGGUAAGUUUUAGAGCUAGA | 666 |
| 160635116_spCas9 | AAUAGCAAGUUAAAAUAAGGCUAGUCCGUUAUCAACUUGA | |
| | AAAAGUGGCACCGAGUCGGUGCmUsmUsmUsU | |
| CBE_NGA_20nt_3-16_035_−_ | mGsmCsmUsCCUUCCGAACAAGGUAAGUUUUAGAGCUAGA | 667 |
| 160635115_spCas9 | AAUAGCAAGUUAAAAUAAGGCUAGUCCGUUAUCAACUUGA | |
| | AAAAGUGGCACCGAGUCGGUGCmUsmUsmUsU | |
| CBE_NGA_20nt_4-9_006_−_ | mGsmCsmUsCCUUCCGAACAAGGUAAGUUUUAGAGCUAGA | 668 |
| 160635115_spCas9 | AAUAGCAAGUUAAAAUAAGGCUAGUCCGUUAUCAACUUGA | |
| | AAAAGUGGCACCGAGUCGGUGCmUsmUsmUsU | |
| CBE_NG_20nt_4-9_028_−_ | mGsmCsmUsCCUUCCGAACAAGGUAAGUUUUAGAGCUAGA | 669 |
| 160635116_spCas9 | AAUAGCAAGUUAAAAUAAGGCUAGUCCGUUAUCAACUUGA | |
| | AAAAGUGGCACCGAGUCGGUGCmUsmUsmUsU | |
| CBE_NGA_20nt_3-16_035- | mGsmCsmUsCCUUCCGAACAAGGUAAGUUUUAGAGCUAGA | 670 |
| 160635115_spCas9 | AAUAGCAAGUUAAAAUAAGGCUAGUCCGUUAUCAACUUGA | |
| | AAAAGUGGCACCGAGUCGGUGCmUsmUsmUsU | |
| CBE_NNGRRT_21nt_3- | mAsmGsmGsCUCCUUCCGAACAAGGUAGUUUUAGUACUCU | 671 |
| 12_012_−_ | GUAAUGAAAAUUACAGAAUCUACUAAAACAAGGCAAAAUG | |
| 160635113_saCas9 | CCGUGUUUAUCUCGUCAACUUGUUGGCGAGAUsmUsmUsm | |
| | U | |
| CBE_NNGRRT_21nt_3- | mAsmGsmGsCUCCUUCCGAACAAGGUAGUUUUAGUACUCU | 672 |
| 12_012_−_ | GUAAUGAAAAUUACAGAAUCUACUAAAACAAGGCAAAAUG | |
| 160635113_saCas9 | CCGUGUUUAUCUCGUCAACUUGUUGGCGAGAUsmUsmUsm | |
| | U | |
| CBE_NGG_20nt_3-16_033_−_ | mCsmUsmAsGAGGCUCCUUCCGAACAGUUUUAGAGCUAGA | 673 |
| 160635121_SpCas9 | AAUAGCAAGUUAAAAUAAGGCUAGUCCGUUAUCAACUUGA | |
| | AAAAGUGGCACCGAGUCGGUGCmUsmUsmUsU | |
| CBE_NGG_20nt_3-16_033_−_ | mCsmUsmAsGAGGCUCCUUCCGAACAGUUUUAGAGCUAGA | 674 |
| 160635121_SpCas9 | AAUAGCAAGUUAAAAUAAGGCUAGUCCGUUAUCAACUUGA | |
| | AAAAGUGGCACCGAGUCGGUGCmUsmUsmUsU | |
| CBE_NG_20nt_4-9_028_−_ | mUsmAsmGsAGGCUCCUUCCGAACAAGUUUUAGAGCUAGA | 675 |
| 160635121_spCas9 | AAUAGCAAGUUAAAAUAAGGCUAGUCCGUUAUCAACUUGA | |
| | AAAAGUGGCACCGAGUCGGUGCmUsmUsmUsU | |
| CBE_NGA_20nt_3-16_035_−_ | mCsmCsmAsAGCCUAGAGGCUCCUUCGUUUUAGAGCUAGA | 676 |
| 160635127_spCas9 | AAUAGCAAGUUAAAAUAAGGCUAGUCCGUUAUCAACUUGA | |
| | AAAAGUGGCACCGAGUCGGUGCmUsmUsmUsU | |
| CBE_NGG_20nt_4-9_003_−_ | mUsmCsmCsACGGCUGUUUCUGAACAGUUUUAGAGCUAGA | 677 |
| 160590942_spCas9 | AAUAGCAAGUUAAAAUAAGGCUAGUCCGUUAUCAACUUGA | |
| | AAAAGUGGCACCGAGUCGGUGCmUsmUsmUsU | |
| CBE_NG_20nt_4-9_028_−_ | mUsmCsmCsACGGCUGUUUCUGAACAGUUUUAGAGCUAGA | 678 |
| 160590943_spCas9 | AAUAGCAAGUUAAAAUAAGGCUAGUCCGUUAUCAACUUGA | |
| | AAAAGUGGCACCGAGUCGGUGCmUsmUsmUSU | |
| CBE_NGG_20nt_3-16_033_−_ | mUsmCsmCsACGGCUGUUUCUGAACAGUUUUAGAGCUAGA | 679 |
| 160590942_SpCas9 | AAUAGCAAGUUAAAAUAAGGCUAGUCCGUUAUCAACUUGA | |
| | AAAAGUGGCACCGAGUCGGUGCmUsmUsmUsU | |
| CBE_NNNRRT_21nt_3- | mAsmCsmGsUCCACGGCUGUUUCUGAAGUUUUAGUACUCU | 680 |
| 12_015_−_ | GUAAUGAAAAUUACAGAAUCUACUAAAACAAGGCAAAAUG | |
| 160590941_saCas9 | CCGUGUUUAUCUCGUCAACUUGUUGGCGAGAUsmUsmUsm | |
| | U | |
| CBE_NG_20nt_4-9_028_−_ | mCsmCsmAsCGGCUGUUUCUGAACAAGUUUUAGAGCUAGA | 681 |
| 160590942_spCas9 | AAUAGCAAGUUAAAAUAAGGCUAGUCCGUUAUCAACUUGA | |
| | AAAAGUGGCACCGAGUCGGUGCmUsmUsmUsU | |
| CBE_NRCH_20nt_3- | mGsmAsmCsGUCCACGGCUGUUUCUGGUUUUAGAGCUAGA | 682 |
| 9_030_−_160590945_spCas9 | AAUAGCAAGUUAAAAUAAGGCUAGUCCGUUAUCAACUUGA | |
| | AAAAGUGGCACCGAGUCGGUGCmUsmUsmUsU | |
| CBE_NGA_20nt_3-16_035_−_ | mGsmCsmGsACGUCCACGGCUGUUUCGUUUUAGAGCUAGA | 683 |
| 160590948_spCas9 | AAUAGCAAGUUAAAAUAAGGCUAGUCCGUUAUCAACUUGA | |
| | AAAAGUGGCACCGAGUCGGUGCmUsmUsmUsU | |
| ABE_NGG_20nt_3- | mUsmAsmCsUCAUUUGGGUAGUUUUCGUUUUAGAGCUAGA | 684 |
| 9_002_+_160556021_spCas9 | AAUAGCAAGUUAAAAUAAGGCUAGUCCGUUAUCAACUUGA | |
| | AAAAGUGGCACCGAGUCGGUGCmUsmUsmUsU | |
| ABE_NG_20nt_3- | mUsmAsmCsUCAUUUGGGUAGUUUUCGUUUUAGAGCUAGA | 685 |
| 9_027_+_160556021_spCas9 | AAUAGCAAGUUAAAAUAAGGCUAGUCCGUUAUCAACUUGA | |
| | AAAAGUGGCACCGAGUCGGUGCmUsmUsmUsU | |
| ABE_NGG_20nt_3- | mUsmAsmCsUCAUUUGGGUAGUUUUCGUUUUAGAGCUAGA | 686 |
| 12_018_+_160556021_spCas9 | AAUAGCAAGUUAAAAUAAGGCUAGUCCGUUAUCAACUUGA | |
| | AAAAGUGGCACCGAGUCGGUGCmUsmUsmUsU | |
| ABE_NGG_20nt_3- | mAsmCsmUsCAUUUGGGUAGUUUUCUGUUUUAGAGCUAGA | 687 |
| 9_002_+_160556022_spCas9 | AAUAGCAAGUUAAAAUAAGGCUAGUCCGUUAUCAACUUGA | |
| | AAAAGUGGCACCGAGUCGGUGCmUsmUsmUsU | |
| ABE_NG_20nt_3- | mAsmCsmUsCAUUUGGGUAGUUUUCUGUUUUAGAGCUAGA | 688 |
| 9_027_+_160556022_spCas9 | AAUAGCAAGUUAAAAUAAGGCUAGUCCGUUAUCAACUUGA | |
| | AAAAGUGGCACCGAGUCGGUGCmUsmUsmUSU | |
| ABE_NGG_20nt_3- | mAsmCsmUsCAUUUGGGUAGUUUUCUGUUUUAGAGCUAGA | 689 |
| 12_018_+_160556022_spCas9 | AAUAGCAAGUUAAAAUAAGGCUAGUCCGUUAUCAACUUGA | |
| | AAAAGUGGCACCGAGUCGGUGCmUsmUsmUsU | |
| ABE_NGG_20nt_3- | mCsmUsmCsAUUUGGGUAGUUUUCUGGUUUUAGAGCUAGA | 690 |
| 9_002_+_160556023_spCas9 | AAUAGCAAGUUAAAAUAAGGCUAGUCCGUUAUCAACUUGA | |
| | AAAAGUGGCACCGAGUCGGUGCmUsmUsmUsU | |
| ABE_NG_20nt_3- | mCsmUsmCsAUUUGGGUAGUUUUCUGGUUUUAGAGCUAGA | 691 |
| 9_027_+_160556023_spCas9 | AAUAGCAAGUUAAAAUAAGGCUAGUCCGUUAUCAACUUGA | |
| | AAAAGUGGCACCGAGUCGGUGCmUsmUsmUsU | |
| ABE_NGG_20nt_3- | mCsmUsmCsAUUUGGGUAGUUUUCUGGUUUUAGAGCUAGA | 692 |
| 12_018_+_160556023_spCas9 | AAUAGCAAGUUAAAAUAAGGCUAGUCCGUUAUCAACUUGA | |
| | AAAAGUGGCACCGAGUCGGUGCmUsmUsmUsU | |
| ABE_NNGRRT_21nt_5- | mAsmUsmAsCUCAUUUGGGUAGUUUUCGUUUUAGUACUCU | 693 |
| 14_011_+_160556020_saCas9 | GUAAUGAAAAUUACAGAAUCUACUAAAACAAGGCAAAAUG | |
| | CCGUGUUUAUCUCGUCAACUUGUUGGCGAGAUsmUsmUsm | |
| | U | |
| ABE_NG_20nt_3- | mUsmCsmAsUUUGGGUAGUUUUCUGGGUUUUAGAGCUAGA | 694 |
| 9_027_+_160556024_spCas9 | AAUAGCAAGUUAAAAUAAGGCUAGUCCGUUAUCAACUUGA | |
| | AAAAGUGGCACCGAGUCGGUGCmUsmUsmUsU | |
| ABE_NGC_20nt_3- | mAsmGsmUsAACAGUGGUUGCCUUCUGUUUUAGAGCUAGA | 695 |
| 9_008_+_160547881_spCas9 | AAUAGCAAGUUAAAAUAAGGCUAGUCCGUUAUCAACUUGA | |
| | AAAAGUGGCACCGAGUCGGUGCmUsmUsmUsU | |
| ABE_NG_20nt_3- | mAsmGsmUsAACAGUGGUUGCCUUCUGUUUUAGAGCUAGA | 696 |
| 9_027_+_160547881_spCas9 | AAUAGCAAGUUAAAAUAAGGCUAGUCCGUUAUCAACUUGA | |
| | AAAAGUGGCACCGAGUCGGUGCmUsmUsmUsU | |
| ABE_NGC_20nt_3- | mAsmGsmUsAACAGUGGUUGCCUUCUGUUUUAGAGCUAGA | 697 |
| 12_020_+_160547881_spCas9 | AAUAGCAAGUUAAAAUAAGGCUAGUCCGUUAUCAACUUGA | |
| | AAAAGUGGCACCGAGUCGGUGCmUsmUsmUsU | |
| ABE_NRCH_20nt_3- | mAsmGsmUsAACAGUGGUUGCCUUCUGUUUUAGAGCUAGA | 698 |
| 9_024_+_160547881_spCas9 | AAUAGCAAGUUAAAAUAAGGCUAGUCCGUUAUCAACUUGA | |
| | AAAAGUGGCACCGAGUCGGUGCmUsmUsmUsU | |
| CBE_NGG_20nt_4- | mCsmUsmGsCGUCUGAGCAUUGCGUCGUUUUAGAGCUAGA | 699 |
| 9_003_+_160635188_spCas9 | AAUAGCAAGUUAAAAUAAGGCUAGUCCGUUAUCAACUUGA | |
| | AAAAGUGGCACCGAGUCGGUGCmUsmUsmUsU | |
| CBE_NG_20nt_4- | mCsmUsmGsCGUCUGAGCAUUGCGUCGUUUUAGAGCUAGA | 700 |
| 9_028_+_160635188_spCas9 | AAUAGCAAGUUAAAAUAAGGCUAGUCCGUUAUCAACUUGA | |
| | AAAAGUGGCACCGAGUCGGUGCmUsmUsmUsU | |
| CBE_NGG_20nt_3- | mCsmUsmGsCGUCUGAGCAUUGCGUCGUUUUAGAGCUAGA | 701 |
| 16_033_+_160635188_SpCas9 | AAUAGCAAGUUAAAAUAAGGCUAGUCCGUUAUCAACUUGA | |
| | AAAAGUGGCACCGAGUCGGUGCmUsmUsmUSU | |
| CBE_NNNRRT_21nt_3- | mCsmUsmUsCUGCGUCUGAGCAUUGCGGUUUUAGUACUCU | 702 |
| 12_015_+_160635185_saCas9 | GUAAUGAAAAUUACAGAAUCUACUAAAACAAGGCAAAAUG | |
| | CCGUGUUUAUCUCGUCAACUUGUUGGCGAGAUsmUsmUsm | |
| | U | |
| CBE_NG_20nt_4- | mCsmCsmUsUCUGCGUCUGAGCAUUGGUUUUAGAGCUAGA | 703 |
| 9_028_+_160635184_spCas9 | AAUAGCAAGUUAAAAUAAGGCUAGUCCGUUAUCAACUUGA | |
| | AAAAGUGGCACCGAGUCGGUGCmUsmUsmUsU | |
| CBE_NNNRRT_21nt_3- | mAsmUsmGsUGCCUCGGUAACUCUGUCGUUUUAGUACUCU | 704 |
| 12_015_+_160599590_saCas9 | GUAAUGAAAAUUACAGAAUCUACUAAAACAAGGCAAAAUG | |
| | CCGUGUUUAUCUCGUCAACUUGUUGGCGAGAUsmUsmUsm | |
| | U | |
| CBE_NNNRRT_21nt_3- | mUsmGsmCsCUCGGUAACUCUGUCCAUGUUUUAGUACUCU | 705 |
| 12_015_+_160599593_saCas9 | GUAAUGAAAAUUACAGAAUCUACUAAAACAAGGCAAAAUG | |
| | CCGUGUUUAUCUCGUCAACUUGUUGGCGAGAUsmUsmUsm | |
| | U | |
| CBE_NNNRRT_21nt_3- | mCsmUsmCsGGUAACUCUGUCCAUAAUGUUUUAGUACUCU | 706 |
| 12_015_+_160599596_saCas9 | GUAAUGAAAAUUACAGAAUCUACUAAAACAAGGCAAAAUG | |
| | CCGUGUUUAUCUCGUCAACUUGUUGGCGAGAUsmUsmUsm | |
| | U | |
| CBE_NGG_20nt_3- | mCsmUsmCsGGUAACUCUGUCCAUAAGUUUUAGAGCUAGA | 707 |
| 16_033_+_160599596_SpCas9 | AAUAGCAAGUUAAAAUAAGGCUAGUCCGUUAUCAACUUGA | |
| | AAAAGUGGCACCGAGUCGGUGCmUsmUsmUsU | |
| ABE_NGG_20nt_3- | mGsmGsmUsAAUGGCCAGAGUUAUCGGUUUUAGAGCUAGA | 708 |
| 12_018_−_ | AAUAGCAAGUUAAAAUAAGGCUAGUCCGUUAUCAACUUGA | |
| 160556120_spCas9 | AAAAGUGGCACCGAGUCGGUGCmUsmUsmUsU | |
| ABE_NGC_20nt_3-12_020_−_ | mGsmUsmAsAUGGCCAGAGUUAUCGAGUUUUAGAGCUAGA | 709 |
| 160556119_spCas9 | AAUAGCAAGUUAAAAUAAGGCUAGUCCGUUAUCAACUUGA | |
| | AAAAGUGGCACCGAGUCGGUGCmUsmUsmUSU | |
| ABE_NRCH_20nt_3- | mAsmAsmUsGGCCAGAGUUAUCGAGGGUUUUAGAGCUAGA | 710 |
| 9_024_−_160556116_spCas9 | AAUAGCAAGUUAAAAUAAGGCUAGUCCGUUAUCAACUUGA | |
| | AAAAGUGGCACCGAGUCGGUGCmUsmUsmUsU | |
| ABE_NGA_20nt_13- | mAsmUsmGsGUAAUGGCCAGAGUUAUGUUUUAGAGCUAGA | 711 |
| 16_034_−_ | AAUAGCAAGUUAAAAUAAGGCUAGUCCGUUAUCAACUUGA | |
| 160556122_SpCas9 | AAAAGUGGCACCGAGUCGGUGCmUsmUsmUsU | |
| CBE_NGG_20nt_4-9_003_−_ | mCsmGsmUsCCCUCCGAAUGUUAUUCGUUUUAGAGCUAGA | 712 |
| 160600946_spCas9 | AAUAGCAAGUUAAAAUAAGGCUAGUCCGUUAUCAACUUGA | |
| | AAAAGUGGCACCGAGUCGGUGCmUsmUsmUsU | |
| CBE_NG_20nt_4-9_028_−_ | mCsmGsmUsCCCUCCGAAUGUUAUUCGUUUUAGAGCUAGA | 713 |
| 160600947_spCas9 | AAUAGCAAGUUAAAAUAAGGCUAGUCCGUUAUCAACUUGA | |
| | AAAAGUGGCACCGAGUCGGUGCmUsmUsmUsU | |
| CBE_NGG_20nt_3-16_033_−_ | mCsmGsmUsCCCUCCGAAUGUUAUUCGUUUUAGAGCUAGA | 714 |
| 160600946_SpCas9 | AAUAGCAAGUUAAAAUAAGGCUAGUCCGUUAUCAACUUGA | |
| | AAAAGUGGCACCGAGUCGGUGCmUsmUsmUsU | |
| CBE_NGC_20nt_4-9_009_−_ | mGsmUsmCsCCUCCGAAUGUUAUUCUGUUUUAGAGCUAGA | 715 |
| 160600945_spCas9 | AAUAGCAAGUUAAAAUAAGGCUAGUCCGUUAUCAACUUGA | |
| | AAAAGUGGCACCGAGUCGGUGCmUsmUsmUsU | |
| CBE_NG_20nt_4-9_028_−_ | mGsmUsmCsCCUCCGAAUGUUAUUCUGUUUUAGAGCUAGA | 716 |
| 160600946_spCas9 | AAUAGCAAGUUAAAAUAAGGCUAGUCCGUUAUCAACUUGA | |
| | AAAAGUGGCACCGAGUCGGUGCmUsmUsmUsU | |
| CBE_NRCH_20nt_3- | mGsmUsmCsCCUCCGAAUGUUAUUCUGUUUUAGAGCUAGA | 717 |
| 9_030_−_160600944_spCas9 | AAUAGCAAGUUAAAAUAAGGCUAGUCCGUUAUCAACUUGA | |
| | AAAAGUGGCACCGAGUCGGUGCmUsmUsmUsU | |
| ABE_NGC_20nt_3-12_020_−_ | mGsmUsmGsAUGGACAGAGUUAUCGAGUUUUAGAGCUAGA | 718 |
| 160585140_spCas9 | AAUAGCAAGUUAAAAUAAGGCUAGUCCGUUAUCAACUUGA | |
| | AAAAGUGGCACCGAGUCGGUGCmUsmUsmUsU | |
| ABE_NRCH_20nt_3- | mUsmGsmGsACAGAGUUAUCGAGGCAGUUUUAGAGCUAGA | 719 |
| 9_024_−_160585135_spCas9 | AAUAGCAAGUUAAAAUAAGGCUAGUCCGUUAUCAACUUGA | |
| | AAAAGUGGCACCGAGUCGGUGCmUsmUsmUsU | |
| ABE_NGG_20nt_13- | mGsmGsmUsGAUGGACAGAGUUAUCGGUUUUAGAGCUAGA | 720 |
| 16_032_−_ | AAUAGCAAGUUAAAAUAAGGCUAGUCCGUUAUCAACUUGA | |
| 160585141_SpCas9 | AAAAGUGGCACCGAGUCGGUGCmUsmUsmUsU | |
| ABE_NGA_20nt_13- | mGsmAsmGsGUGAUGGACAGAGUUAUGUUUUAGAGCUAGA | 721 |
| 16_034_−_ | AAUAGCAAGUUAAAAUAAGGCUAGUCCGUUAUCAACUUGA | |
| 160585143_SpCas9 | AAAAGUGGCACCGAGUCGGUGCmUsmUsmUsU | |
| ABE_NGG_20nt_3-9_002_−_ | mAsmCsmAsCACUUUCUGGGCACUGCGUUUUAGAGCUAGA | 722 |
| 160664225_spCas9 | AAUAGCAAGUUAAAAUAAGGCUAGUCCGUUAUCAACUUGA | |
| | AAAAGUGGCACCGAGUCGGUGCmUsmUsmUsU | |
| ABE_NG_20nt_3-9_027_−_ | mAsmCsmAsCACUUUCUGGGCACUGCGUUUUAGAGCUAGA | 723 |
| 160664226_spCas9 | AAUAGCAAGUUAAAAUAAGGCUAGUCCGUUAUCAACUUGA | |
| | AAAAGUGGCACCGAGUCGGUGCmUsmUsmUsU | |
| ABE_NGG_20nt_3- | mAsmCsmAsCACUUUCUGGGCACUGCGUUUUAGAGCUAGA | 724 |
| 12_018_−_ | AAUAGCAAGUUAAAAUAAGGCUAGUCCGUUAUCAACUUGA | |
| 160664225_spCas9 | AAAAGUGGCACCGAGUCGGUGCmUsmUsmUsU | |
| ABE_NGC_20nt_3-9_008_−_ | mGsmGsmGsACACACUUUCUGGGCACGUUUUAGAGCUAGA | 725 |
| 160664228_spCas9 | AAUAGCAAGUUAAAAUAAGGCUAGUCCGUUAUCAACUUGA | |
| | AAAAGUGGCACCGAGUCGGUGCmUsmUsmUsU | |
| ABE_NG_20nt_3-9_027_−_ | mGsmGsmGsACACACUUUCUGGGCACGUUUUAGAGCUAGA | 726 |
| 160664229_spCas9 | AAUAGCAAGUUAAAAUAAGGCUAGUCCGUUAUCAACUUGA | |
| | AAAAGUGGCACCGAGUCGGUGCmUsmUsmUsU | |
| ABE_NGC_20nt_3-12_020_−_ | mGsmGsmGsACACACUUUCUGGGCACGUUUUAGAGCUAGA | 727 |
| 160664228_spCas9 | AAUAGCAAGUUAAAAUAAGGCUAGUCCGUUAUCAACUUGA | |
| | AAAAGUGGCACCGAGUCGGUGCmUsmUsmUsU | |
| ABE_NRCH_20nt_3- | mGsmGsmGsACACACUUUCUGGGCACGUUUUAGAGCUAGA | 728 |
| 9_024_−_160664227_spCas9 | AAUAGCAAGUUAAAAUAAGGCUAGUCCGUUAUCAACUUGA | |
| | AAAAGUGGCACCGAGUCGGUGCmUsmUsmUsU | |
| ABE_NGG_20nt_3- | mGsmGsmGsAUUGGGACACACUUUCUGUUUUAGAGCUAGA | 729 |
| 12_018_−_ | AAUAGCAAGUUAAAAUAAGGCUAGUCCGUUAUCAACUUGA | |
| 160664234_spCas9 | AAAAGUGGCACCGAGUCGGUGCmUsmUsmUsU | |
| ABE_NGC_20nt_3-12_020_−_ | mGsmGsmAsUUGGGACACACUUUCUGGUUUUAGAGCUAGA | 730 |
| 160664233_spCas9 | AAUAGCAAGUUAAAAUAAGGCUAGUCCGUUAUCAACUUGA | |
| | AAAAGUGGCACCGAGUCGGUGCmUsmUsmUsU | |
| ABE_NRCH_20nt_3- | mAsmUsmUsGGGACACACUUUCUGGGGUUUUAGAGCUAGA | 731 |
| 9_024_−_160664230_spCas9 | AAUAGCAAGUUAAAAUAAGGCUAGUCCGUUAUCAACUUGA | |
| | AAAAGUGGCACCGAGUCGGUGCmUsmUsmUsU | |
| ABE_NGG_20nt_13- | mUsmGsmGsGAUUGGGACACACUUUCGUUUUAGAGCUAGA | 732 |
| 16_032_−_ | AAUAGCAAGUUAAAAUAAGGCUAGUCCGUUAUCAACUUGA | |
| 160664235_SpCas9 | AAAAGUGGCACCGAGUCGGUGCmUsmUsmUsU | |
| CBE_NGG_20nt_4- | mAsmUsmGsCCUCGCCCUGCUUCGGCGUUUUAGAGCUAGA | 733 |
| 9_003_+_160685562_spCas9 | AAUAGCAAGUUAAAAUAAGGCUAGUCCGUUAUCAACUUGA | |
| | AAAAGUGGCACCGAGUCGGUGCmUsmUsmUsU | |
| CBE_NG_20nt_4- | mAsmUsmGsCCUCGCCCUGCUUCGGCGUUUUAGAGCUAGA | 734 |
| 9_028_+_160685562_spCas9 | AAUAGCAAGUUAAAAUAAGGCUAGUCCGUUAUCAACUUGA | |
| | AAAAGUGGCACCGAGUCGGUGCmUsmUsmUsU | |
| CBE_NGG_20nt_3- | mAsmUsmGsCCUCGCCCUGCUUCGGCGUUUUAGAGCUAGA | 735 |
| 16_033_+_160685562_SpCas9 | AAUAGCAAGUUAAAAUAAGGCUAGUCCGUUAUCAACUUGA | |
| | AAAAGUGGCACCGAGUCGGUGCmUsmUsmUsU | |
| CBE_NGC_20nt_4- | mUsmGsmCsCUCGCCCUGCUUCGGCUGUUUUAGAGCUAGA | 736 |
| 9_009_+_160685563_spCas9 | AAUAGCAAGUUAAAAUAAGGCUAGUCCGUUAUCAACUUGA | |
| | AAAAGUGGCACCGAGUCGGUGCmUsmUsmUSU | |
| CBE_NG_20nt_4- | mUsmGsmCsCUCGCCCUGCUUCGGCUGUUUUAGAGCUAGA | 737 |
| 9_028_+_160685563_spCas9 | AAUAGCAAGUUAAAAUAAGGCUAGUCCGUUAUCAACUUGA | |
| | AAAAGUGGCACCGAGUCGGUGCmUsmUsmUsU | |
| CBE_NGC_20nt_4- | mCsmCsmUsCGCCCUGCUUCGGCUGGGUUUUAGAGCUAGA | 738 |
| 9_009_+_160685565_spCas9 | AAUAGCAAGUUAAAAUAAGGCUAGUCCGUUAUCAACUUGA | |
| | AAAAGUGGCACCGAGUCGGUGCmUsmUsmUsU | |
| CBE_NG_20nt_4- | mCsmCsmUsCGCCCUGCUUCGGCUGGGUUUUAGAGCUAGA | 739 |
| 9_028_+_160685565_spCas9 | AAUAGCAAGUUAAAAUAAGGCUAGUCCGUUAUCAACUUGA | |
| | AAAAGUGGCACCGAGUCGGUGCmUsmUsmUsU | |
| CBE_NRCH_20nt_3- | mCsmCsmUsCGCCCUGCUUCGGCUGGGUUUUAGAGCUAGA | 740 |
| 9_030_+_160685565_spCas9 | AAUAGCAAGUUAAAAUAAGGCUAGUCCGUUAUCAACUUGA | |
| | AAAAGUGGCACCGAGUCGGUGCmUsmUsmUsU | |
| CBE_NNNRRT_21nt_3- | mCsmUsmCsGCCCUGCUUCGGCUGGCGGUUUUAGUACUCU | 741 |
| 12_015_+_160685566_saCas9 | GUAAUGAAAAUUACAGAAUCUACUAAAACAAGGCAAAAUG | |
| | CCGUGUUUAUCUCGUCAACUUGUUGGCGAGAUsmUsmUsm | |
| | U | |
| CBE_NRCH_20nt_3- | mUsmCsmGsCCCUGCUUCGGCUGGCGGUUUUAGAGCUAGA | 742 |
| 9_030_+_160685567_spCas9 | AAUAGCAAGUUAAAAUAAGGCUAGUCCGUUAUCAACUUGA | |
| | AAAAGUGGCACCGAGUCGGUGCmUsmUsmUSU | |
| CBE_NGG_20nt_3- | mGsmGsmCsAAUGCCUCGCCCUGCUUGUUUUAGAGCUAGA | 743 |
| 16_033_+_160685558_SpCas9 | AAUAGCAAGUUAAAAUAAGGCUAGUCCGUUAUCAACUUGA | |
| | AAAAGUGGCACCGAGUCGGUGCmUsmUsmUsU | |
| CBE_NGC_20nt_4-9_009_−_ | mGsmGsmUsCACUCCCACCCGAAUACGUUUUAGAGCUAGA | 744 |
| 160685456_spCas9 | AAUAGCAAGUUAAAAUAAGGCUAGUCCGUUAUCAACUUGA | |
| | AAAAGUGGCACCGAGUCGGUGCmUsmUsmUsU | |
| CBE_NG_20nt_4-9_028_−_ | mGsmGsmUsCACUCCCACCCGAAUACGUUUUAGAGCUAGA | 745 |
| 160685457_spCas9 | AAUAGCAAGUUAAAAUAAGGCUAGUCCGUUAUCAACUUGA | |
| | AAAAGUGGCACCGAGUCGGUGCmUsmUsmUSU | |
| CBE_NRCH_20nt_3- | mUsmCsmGsGGUCACUCCCACCCGAAGUUUUAGAGCUAGA | 746 |
| 9_030_−_160685458_spCas9 | AAUAGCAAGUUAAAAUAAGGCUAGUCCGUUAUCAACUUGA | |
| | AAAAGUGGCACCGAGUCGGUGCmUsmUsmUsU | |
| CBE_NGA_20nt_3-16_035_−_ | mAsmAsmAsAUCGGGUCACUCCCACCGUUUUAGAGCUAGA | 747 |
| 160685463_spCas9 | AAUAGCAAGUUAAAAUAAGGCUAGUCCGUUAUCAACUUGA | |
| | AAAAGUGGCACCGAGUCGGUGCmUsmUsmUsU | |
| CBE_NGA_20nt_4- | mUsmGsmGsAUUUCGGCAGUAGUUCUGUUUUAGAGCUAGA | 748 |
| 9_006_+_160601067_spCas9 | AAUAGCAAGUUAAAAUAAGGCUAGUCCGUUAUCAACUUGA | |
| | AAAAGUGGCACCGAGUCGGUGCmUsmUsmUsU | |
| CBE_NG_20nt_4- | mUsmGsmGsAUUUCGGCAGUAGUUCUGUUUUAGAGCUAGA | 749 |
| 9_028_+_160601067_spCas9 | AAUAGCAAGUUAAAAUAAGGCUAGUCCGUUAUCAACUUGA | |
| | AAAAGUGGCACCGAGUCGGUGCmUsmUsmUsU | |
| CBE_NGA_20nt_3- | mUsmGsmGsAUUUCGGCAGUAGUUCUGUUUUAGAGCUAGA | 750 |
| 16_035_+_160601067_spCas9 | AAUAGCAAGUUAAAAUAAGGCUAGUCCGUUAUCAACUUGA | |
| | AAAAGUGGCACCGAGUCGGUGCmUsmUsmUsU | |
| CBE_NNNRRT 21nt_3- | mAsmUsmCsUGGAUUUCGGCAGUAGUUGUUUUAGUACUCU | 751 |
| 12_015_+_160601064_saCas9 | GUAAUGAAAAUUACAGAAUCUACUAAAACAAGGCAAAAUG | |
| | CCGUGUUUAUCUCGUCAACUUGUUGGCGAGAUsmUsmUsm | |
| | U | |
| ABE_NGG_20nt_3- | mGsmAsmAsCAAAGACGUACGCAUUUGUUUUAGAGCUAGA | 752 |
| 9_002_+_160599485_spCas9 | AAUAGCAAGUUAAAAUAAGGCUAGUCCGUUAUCAACUUGA | |
| | AAAAGUGGCACCGAGUCGGUGCmUsmUsmUsU | |
| ABE_NG_20nt_3- | mGsmAsmAsCAAAGACGUACGCAUUUGUUUUAGAGCUAGA | 753 |
| 9_027_+_160599485_spCas9 | AAUAGCAAGUUAAAAUAAGGCUAGUCCGUUAUCAACUUGA | |
| | AAAAGUGGCACCGAGUCGGUGCmUsmUsmUsU | |
| ABE_NGG_20nt_3- | mGsmAsmAsCAAAGACGUACGCAUUUGUUUUAGAGCUAGA | 754 |
| 12_018_+_160599485_spCas9 | AAUAGCAAGUUAAAAUAAGGCUAGUCCGUUAUCAACUUGA | |
| | AAAAGUGGCACCGAGUCGGUGCmUsmUsmUsU | |
| ABE_NNGRRT_21nt_5- | mAsmAsmAsGAACAAAGACGUACGCAUGUUUUAGUACUCU | 755 |
| 14_011_+_160599482_saCas9 | GUAAUGAAAAUUACAGAAUCUACUAAAACAAGGCAAAAUG | |
| | CCGUGUUUAUCUCGUCAACUUGUUGGCGAGAUsmUsmUsm | |
| | U | |
| ABE_NNNRRT_21nt_5- | mGsmAsmAsCAAAGACGUACGCAUUUGGUUUUAGUACUCU | 756 |
| 14_014_+_160599485_saCas9 | GUAAUGAAAAUUACAGAAUCUACUAAAACAAGGCAAAAUG | |
| | CCGUGUUUAUCUCGUCAACUUGUUGGCGAGAUsmUsmUsm | |
| | U | |
| ABE_NG_20nt_3- | mAsmAsmCsAAAGACGUACGCAUUUGGUUUUAGAGCUAGA | 757 |
| 9_027_+_160599486_spCas9 | AAUAGCAAGUUAAAAUAAGGCUAGUCCGUUAUCAACUUGA | |
| | AAAAGUGGCACCGAGUCGGUGCmUsmUsmUsU | |
| ABE_NG_20nt_3- | mAsmAsmAsGACGUACGCAUUUGGGUGUUUUAGAGCUAGA | 758 |
| 9_027_+_160599489_spCas9 | AAUAGCAAGUUAAAAUAAGGCUAGUCCGUUAUCAACUUGA | |
| | AAAAGUGGCACCGAGUCGGUGCmUsmUsmUsU | |
| ABE_NGG_20nt_3- | mAsmGsmAsACAAAGACGUACGCAUUGUUUUAGAGCUAGA | 759 |
| 12_018_+_160599484_spCas9 | AAUAGCAAGUUAAAAUAAGGCUAGUCCGUUAUCAACUUGA | |
| | AAAAGUGGCACCGAGUCGGUGCmUsmUsmUsU | |
| ABE_NGC_20nt_3- | mUsmAsmAsCACCAAGGACUAAUCUCGUUUUAGAGCUAGA | 760 |
| 9_008_+_160591044_spCas9 | AAUAGCAAGUUAAAAUAAGGCUAGUCCGUUAUCAACUUGA | |
| | AAAAGUGGCACCGAGUCGGUGCmUsmUsmUsU | |
| ABE_NG_20nt_3- | mUsmAsmAsCACCAAGGACUAAUCUCGUUUUAGAGCUAGA | 761 |
| 9_027_+_160591044_spCas9 | AAUAGCAAGUUAAAAUAAGGCUAGUCCGUUAUCAACUUGA | |
| | AAAAGUGGCACCGAGUCGGUGCmUsmUsmUsU | |
| ABE_NGC_20nt_3- | mUsmAsmAsCACCAAGGACUAAUCUCGUUUUAGAGCUAGA | 762 |
| 12_020_+_160591044_spCas9 | AAUAGCAAGUUAAAAUAAGGCUAGUCCGUUAUCAACUUGA | |
| | AAAAGUGGCACCGAGUCGGUGCmUsmUsmUsU | |
| ABE_NRCH_20nt_3- | mUsmAsmAsCACCAAGGACUAAUCUCGUUUUAGAGCUAGA | 763 |
| 9_024_+_160591044_spCas9 | AAUAGCAAGUUAAAAUAAGGCUAGUCCGUUAUCAACUUGA | |
| | AAAAGUGGCACCGAGUCGGUGCmUsmUsmUsU | |
| ABE_NGA_20nt_13- | mGsmAsmUsCCAUGGUAUAACACCAAGUUUUAGAGCUAGA | 764 |
| 16_034_+_160591033_SpCas9 | AAUAGCAAGUUAAAAUAAGGCUAGUCCGUUAUCAACUUGA | |
| | AAAAGUGGCACCGAGUCGGUGCmUsmUsmUsU | |
| CBE_NGA_20nt_4-9_006_−_ | mGsmCsmGsAUGCUCAGACACAGAAGGUUUUAGAGCUAGA | 765 |
| 160548537_spCas9 | AAUAGCAAGUUAAAAUAAGGCUAGUCCGUUAUCAACUUGA | |
| | AAAAGUGGCACCGAGUCGGUGCmUsmUsmUsU | |
| CBE_NG_20nt_4-9_028_−_ | mGsmCsmGsAUGCUCAGACACAGAAGGUUUUAGAGCUAGA | 766 |
| 160548538_spCas9 | AAUAGCAAGUUAAAAUAAGGCUAGUCCGUUAUCAACUUGA | |
| | AAAAGUGGCACCGAGUCGGUGCmUsmUsmUsU | |
| CBE_NGA_20nt_3-16_035_−_ | mGsmCsmGsAUGCUCAGACACAGAAGGUUUUAGAGCUAGA | 767 |
| 160548537_spCas9 | AAUAGCAAGUUAAAAUAAGGCUAGUCCGUUAUCAACUUGA | |
| | AAAAGUGGCACCGAGUCGGUGCmUsmUsmUsU | |
| CBE_NNNRRT_21nt_3- | mAsmUsmGsCUCAGACACAGAAGGGACGUUUUAGUACUCU | 768 |
| 12_015_−_ | GUAAUGAAAAUUACAGAAUCUACUAAAACAAGGCAAAAUG | |
| 160548530_saCas9 | CCGUGUUUAUCUCGUCAACUUGUUGGCGAGAUsmUsmUsm | |
| | U | |
| CBE_NG_20nt_4-9_028_−_ | mUsmGsmCsUCAGACACAGAAGGGACGUUUUAGAGCUAGA | 769 |
| 160548534_spCas9 | AAUAGCAAGUUAAAAUAAGGCUAGUCCGUUAUCAACUUGA | |
| | AAAAGUGGCACCGAGUCGGUGCmUsmUsmUsU | |
| CBE_NRCH_20nt_3- | mCsmGsmAsUGCUCAGACACAGAAGGGUUUUAGAGCUAGA | 770 |
| 9_030_−_160548535_spCas9 | AAUAGCAAGUUAAAAUAAGGCUAGUCCGUUAUCAACUUGA | |
| | AAAAGUGGCACCGAGUCGGUGCmUsmUsmUsU | |
| CBE_NGG_20nt_3-16_033_−_ | mAsmCsmGsCGAUGCUCAGACACAGAGUUUUAGAGCUAGA | 771 |
| 160548539_SpCas9 | AAUAGCAAGUUAAAAUAAGGCUAGUCCGUUAUCAACUUGA | |
| | AAAAGUGGCACCGAGUCGGUGCmUsmUsmUsU | |
| CBE_NGG_20nt_3-16_033_−_ | mCsmGsmCsGAUGCUCAGACACAGAAGUUUUAGAGCUAGA | 772 |
| 160548538_SpCas9 | AAUAGCAAGUUAAAAUAAGGCUAGUCCGUUAUCAACUUGA | |
| | AAAAGUGGCACCGAGUCGGUGCmUsmUsmUsU | |
| CBE_NGG_20nt_3-16_033_−_ | mCsmUsmCsAGACACAGAAGGGACUGGUUUUAGAGCUAGA | 773 |
| 160548531_SpCas9 | AAUAGCAAGUUAAAAUAAGGCUAGUCCGUUAUCAACUUGA | |
| | AAAAGUGGCACCGAGUCGGUGCmUsmUsmUsU | |
| CBE_NGA_20nt_3-16_035_−_ | mCsmUsmGsACGCGAUGCUCAGACACGUUUUAGAGCUAGA | 774 |
| 160548542_spCas9 | AAUAGCAAGUUAAAAUAAGGCUAGUCCGUUAUCAACUUGA | |
| | AAAAGUGGCACCGAGUCGGUGCmUsmUsmUsU | |
| ABE_NGA_20nt_3- | mAsmAsmCsAAGGAGCUGGGCUUCCUGUUUUAGAGCUAGA | 775 |
| 9_005_+_160532605_spCas9 | AAUAGCAAGUUAAAAUAAGGCUAGUCCGUUAUCAACUUGA | |
| | AAAAGUGGCACCGAGUCGGUGCmUsmUsmUsU | |
| ABE_NG_20nt_3- | mAsmAsmCsAAGGAGCUGGGCUUCCUGUUUUAGAGCUAGA | 776 |
| 9_027_+_160532605_spCas9 | AAUAGCAAGUUAAAAUAAGGCUAGUCCGUUAUCAACUUGA | |
| | AAAAGUGGCACCGAGUCGGUGCmUsmUsmUsU | |
| ABE_NGA_20nt_3- | mAsmAsmCsAAGGAGCUGGGCUUCCUGUUUUAGAGCUAGA | 777 |
| 12_019_+_160532605_spCas9 | AAUAGCAAGUUAAAAUAAGGCUAGUCCGUUAUCAACUUGA | |
| | AAAAGUGGCACCGAGUCGGUGCmUsmUsmUsU | |
| ABE_NGA_20nt_3- | mCsmAsmAsGGAGCUGGGCUUCCUUGGUUUUAGAGCUAGA | 778 |
| 9 005_+_160532607_spCas9 | AAUAGCAAGUUAAAAUAAGGCUAGUCCGUUAUCAACUUGA | |
| | AAAAGUGGCACCGAGUCGGUGCmUsmUsmUsU | |
| ABE_NG 20nt_3- | mCsmAsmAsGGAGCUGGGCUUCCUUGGUUUUAGAGCUAGA | 779 |
| 9 027_+_160532607_spCas9 | AAUAGCAAGUUAAAAUAAGGCUAGUCCGUUAUCAACUUGA | |
| | AAAAGUGGCACCGAGUCGGUGCmUsmUsmUsU | |
| ABE_NGA_20nt_3- | mCsmAsmAsGGAGCUGGGCUUCCUUGGUUUUAGAGCUAGA | 780 |
| 12_019_+_160532607_spCas9 | AAUAGCAAGUUAAAAUAAGGCUAGUCCGUUAUCAACUUGA | |
| | AAAAGUGGCACCGAGUCGGUGCmUsmUsmUsU | |
| ABE_NGG_20nt_13- | mCsmAsmUsUCUCAAUAACAAGGAGCGUUUUAGAGCUAGA | 781 |
| 16_032_+_160532595_SpCas9 | AAUAGCAAGUUAAAAUAAGGCUAGUCCGUUAUCAACUUGA | |
| | AAAAGUGGCACCGAGUCGGUGCmUsmUsmUsU | |
| ABE_NGG_20nt_13- | mAsmUsmUsCUCAAUAACAAGGAGCUGUUUUAGAGCUAGA | 782 |
| 16_032_+_160532596_SpCas9 | AAUAGCAAGUUAAAAUAAGGCUAGUCCGUUAUCAACUUGA | |
| | AAAAGUGGCACCGAGUCGGUGCmUsmUsmUSU | |
| CBE_NGC_20nt_4- | mUsmCsmUsUACCUGGCAACUGUCAGGUUUUAGAGCUAGA | 783 |
| 9_009_+_160532524_spCas9 | AAUAGCAAGUUAAAAUAAGGCUAGUCCGUUAUCAACUUGA | |
| | AAAAGUGGCACCGAGUCGGUGCmUsmUsmUsU | |
| CBE_NG_20nt_4- | mUsmCsmUsUACCUGGCAACUGUCAGGUUUUAGAGCUAGA | 784 |
| 9_028_+_160532524_spCas9 | AAUAGCAAGUUAAAAUAAGGCUAGUCCGUUAUCAACUUGA | |
| | AAAAGUGGCACCGAGUCGGUGCmUsmUsmUsU | |
| CBE_NRCH_20nt_3- | mUsmCsmUsUACCUGGCAACUGUCAGGUUUUAGAGCUAGA | 785 |
| 9_030_+_160532524_spCas9 | AAUAGCAAGUUAAAAUAAGGCUAGUCCGUUAUCAACUUGA | |
| | AAAAGUGGCACCGAGUCGGUGCmUsmUsmUsU | |
| CBE_NG_20nt_4- | mUsmUsmUsCUUACCUGGCAACUGUCGUUUUAGAGCUAGA | 786 |
| 9_028_+_160532522_spCas9 | AAUAGCAAGUUAAAAUAAGGCUAGUCCGUUAUCAACUUGA | |
| | AAAAGUGGCACCGAGUCGGUGCmUsmUsmUsU | |
| ABE_NGG_20nt_3-9_002_−_ | mGsmUsmGsUCUAUGCUCGUGUUUCAGUUUUAGAGCUAGA | 787 |
| 160531767_spCas9 | AAUAGCAAGUUAAAAUAAGGCUAGUCCGUUAUCAACUUGA | |
| | AAAAGUGGCACCGAGUCGGUGCmUsmUsmUsU | |
| ABE_NG_20nt_3-9_027_−_ | mGsmUsmGsUCUAUGCUCGUGUUUCAGUUUUAGAGCUAGA | 788 |
| 160531768_spCas9 | AAUAGCAAGUUAAAAUAAGGCUAGUCCGUUAUCAACUUGA | |
| | AAAAGUGGCACCGAGUCGGUGCmUsmUsmUsU | |
| ABE_NGG_20nt_3- | mGsmUsmGsUCUAUGCUCGUGUUUCAGUUUUAGAGCUAGA | 789 |
| 12_018_−_ | AAUAGCAAGUUAAAAUAAGGCUAGUCCGUUAUCAACUUGA | |
| 160531767_spCas9 | AAAAGUGGCACCGAGUCGGUGCmUsmUsmUsU | |
| ABE_NNNRRT_21nt_5- | mCsmUsmGsGUGUCUAUGCUCGUGUUUGUUUUAGUACUCU | 790 |
| 14_014_−_ | GUAAUGAAAAUUACAGAAUCUACUAAAACAAGGCAAAAUG | |
| 160531766_saCas9 | CCGUGUUUAUCUCGUCAACUUGUUGGCGAGAUsmUsmUsm | |
| | U | |
| ABE_NG_20nt_3-9_027_−_ | mUsmGsmUsCUAUGCUCGUGUUUCAAGUUUUAGAGCUAGA | 791 |
| 160531767_spCas9 | AAUAGCAAGUUAAAAUAAGGCUAGUCCGUUAUCAACUUGA | |
| | AAAAGUGGCACCGAGUCGGUGCmUsmUsmUsU | |
| gRNA5755-6621 | mCsmAsmCsUGGCAUCAGAGGACCCCGUUUUAGAGCUAGAAAUAGCAAG | 792 |
| | UUAAAAUAAGGCUAGUCCGUUAUCAACUUGAAAAAGUGGCACCGAGUCG | |
| | GUGCmUsmUsmUsU | |
| gRNA5756-6622 | mGsmGsmCAUCAGAGGACCCCAGAAGUUUUAGAGCUAGAAAUAGCAAG | 793 |
| | UUAAAAUAAGGCUAGUCCGUUAUCAACUUGAAAAAGUGGCACCGAGUCG | |
| | GUGCmUsmUsmUsU | |
| gRNA5757-6623 | mUsmGsmASUACCACACUGGCAUCAGGUUUUAGAGCUAGAAAUAGCAAG | 794 |
| | UUAAAAUAAGGCUAGUCCGUUAUCAACUUGAAAAAGUGGCACCGAGUCG | |
| | GUGCmUsmUsmUsU | |
| gRNA5758-6624 | mGsmAsmUsACCACACUGGCAUCAGAGUUUUAGAGCUAGAAAUAGCAAG | 795 |
| | UUAAAAUAAGGCUAGUCCGUUAUCAACUUGAAAAAGUGGCACCGAGUCG | |
| | GUGCmUsmUsmUsU | |
| gRNA5759-6625 | mGsmGsmGsCUUUUCUCAGGUGGUGCGUUUUAGAGCUAGAAAUAGCAAG | 796 |
| | UUAAAAUAAGGCUAGUCCGUUAUCAACUUGAAAAAGUGGCACCGAGUCG | |
| | GUGCmUsmUsmUsU | |
| gRNA5760-6626 | mAsmCsmAsGGGCUUUUCUCAGGUGGGUUUUAGAGCUAGAAAUAGCAAG | 797 |
| | UUAAAAUAAGGCUAGUCCGUUAUCAACUUGAAAAAGUGGCACCGAGUCG | |
| | GUGCmUsmUsmUsU | |
| gRNA5761-6627 | mAsmGsmGsGCUUUUCUCAGGUGGUGCGUUUUAGUACUCUGUAAUGAAA | 798 |
| | AUUACAGAAUCUACUAAAACAAGGCAAAAUGCCGUGUUUAUCUCGUCAA | |
| | CUUGUUGGCGAGAUsmUsmUsmU | |
| gRNA5762-6628 | mCsmCsmAsCAGGGCUUUUCUCAGGUGUUUUAGAGCUAGAAAUAGCAAG | 799 |
| | UUAAAAUAAGGCUAGUCCGUUAUCAACUUGAAAAAGUGGCACCGAGUCG | |
| | GUGCmUsmUsmUsU | |
| gRNA5763-6629 | mUsmGsmGsACCACAGGGCUUUUCUCGUUUUAGAGCUAGAAAUAGCAAG | 800 |
| | UUAAAAUAAGGCUAGUCCGUUAUCAACUUGAAAAAGUGGCACCGAGUCG | |
| | GUGCmUsmUsmUsU | |
| gRNA5764-6630 | mAsmCsmCsACAGGGCUUUUCUCAGGGUUUUAGAGCUAGAAAUAGCAAG | 801 |
| | UUAAAAUAAGGCUAGUCCGUUAUCAACUUGAAAAAGUGGCACCGAGUCG | |
| | GUGCmUsmUsmUsU | |
| gRNA5765-6631 | mCsmAsmCsUGGCAUCAGAGAACCACGUUUUAGAGCUAGAAAUAGCAAG | 802 |
| | UUAAAAUAAGGCUAGUCCGUUAUCAACUUGAAAAAGUGGCACCGAGUCG | |
| | GUGCmUsmUsmUsU | |
| gRNA5766-6632 | mCsmAsmCsACUGGCAUCAGAGAACCAGUUUUAGUACUCUGUAAUGAAA | 803 |
| | AUUACAGAAUCUACUAAAACAAGGCAAAAUGCCGUGUUUAUCUCGUCAA | |
| | CUUGUUGGCGAGAUsmUsmUsmU | |
| gRNA5767-6633 | mGsmGsmCsAUCAGAGAACCACAGAAGUUUUAGAGCUAGAAAUAGCAAG | 804 |
| | UUAAAAUAAGGCUAGUCCGUUAUCAACUUGAAAAAGUGGCACCGAGUCG | |
| | GUGCmUsmUsmUsU | |
| gRNA5768-6634 | mUsmGsmAsCACCACACUGGCAUCAGGUUUUAGAGCUAGAAAUAGCAAG | 805 |
| | UUAAAAUAAGGCUAGUCCGUUAUCAACUUGAAAAAGUGGCACCGAGUCG | |
| | GUGCmUsmUsmUsU | |
| gRNA5769-6635 | mUsmAsmCsUGCCGUAACCCUGAUGGGUUUUAGAGCUAGAAAUAGCAAG | 806 |
| | UUAAAAUAAGGCUAGUCCGUUAUCAACUUGAAAAAGUGGCACCGAGUCG | |
| | GUGCmUsmUsmUsU | |
| gRNA5770-6636 | mUsmGsmCsCGUAACCCUGAUGGUGACGUUUUAGUACUCUGUAAUGAAA | 807 |
| | AUUACAGAAUCUACUAAAACAAGGCAAAAUGCCGUGUUUAUCUCGUCAA | |
| | CUUGUUGGCGAGAUsmUsmUsmU | |
| gRNA5771-6637 | mAsmGsmUsACUGCCGUAACCCUGAUGUUUUAGAGCUAGAAAUAGCAAG | 808 |
| | UUAAAAUAAGGCUAGUCCGUUAUCAACUUGAAAAAGUGGCACCGAGUCG | |
| | GUGCmUsmUsmUsU | |
| gRNA5772-6638 | mAsmCsmUsGCCGUAACCCUGAUGGUGUUUUAGAGCUAGAAAUAGCAAG | 809 |
| | UUAAAAUAAGGCUAGUCCGUUAUCAACUUGAAAAAGUGGCACCGAGUCG | |
| | GUGCmUsmUsmUsU | |
| gRNA5773-6639 | mCsmAsmGsUACUGCCGUAACCCUGAGUUUUAGAGCUAGAAAUAGCAAG | 810 |
| | UUAAAAUAAGGCUAGUCCGUUAUCAACUUGAAAAAGUGGCACCGAGUCG | |
| | GUGCmUsmUsmUsU | |
| gRNA5774-6640 | mUsmUsmUsCAGUACUGCCGUAACCCGUUUUAGAGCUAGAAAUAGCAAG | 811 |
| | UUAAAAUAAGGCUAGUCCGUUAUCAACUUGAAAAAGUGGCACCGAGUCG | |
| | GUGCmUsmUsmUsU | |
| gRNA5775-6641 | mGsmGsmCsUCCUUCCGAACAAGGUAGUUUUAGAGCUAGAAAUAGCAAG | 812 |
| | UUAAAAUAAGGCUAGUCCGUUAUCAACUUGAAAAAGUGGCACCGAGUCG | |
| | GUGCmUsmUsmUsU | |
| gRNA5776-6642 | mGsmCsmUsCCUUCCGAACAAGGUAAGUUUUAGAGCUAGAAAUAGCAAG | 813 |
| | UUAAAAUAAGGCUAGUCCGUUAUCAACUUGAAAAAGUGGCACCGAGUCG | |
| | GUGCmUsmUsmUsU | |
| gRNA5777-6643 | mAsmGsmGsCUCCUUCCGAACAAGGUAGUUUUAGUACUCUGUAAUGAAA | 814 |
| | AUUACAGAAUCUACUAAAACAAGGCAAAAUGCCGUGUUUAUCUCGUCAA | |
| | CUUGUUGGCGAGAUsmUsmUsmU | |
| gRNA5778-6644 | mCsmUsmAsGAGGCUCCUUCCGAACAGUUUUAGAGCUAGAAAUAGCAAG | 815 |
| | UUAAAAUAAGGCUAGUCCGUUAUCAACUUGAAAAAGUGGCACCGAGUCG | |
| | GUGCmUsmUsmUsU | |
| gRNA5779-6645 | mUsmAsmGsAGGCUCCUUCCGAACAAGUUUUAGAGCUAGAAAUAGCAAG | 816 |
| | UUAAAAUAAGGCUAGUCCGUUAUCAACUUGAAAAAGUGGCACCGAGUCG | |
| | GUGCmUsmUsmUsU | |
| gRNA5780-6646 | mCsmCsmAsAGCCUAGAGGCUCCUUCGUUUUAGAGCUAGAAAUAGCAAG | 817 |
| | UUAAAAUAAGGCUAGUCCGUUAUCAACUUGAAAAAGUGGCACCGAGUCG | |
| | GUGCmUsmUsmUsU | |
| gRNA5781-6647 | mUsmCsmCsACGGCUGUUUCUGAACAGUUUUAGAGCUAGAAAUAGCAAG | 818 |
| | UUAAAAUAAGGCUAGUCCGUUAUCAACUUGAAAAAGUGGCACCGAGUCG | |
| | GUGCmUsmUsmUsU | |
| gRNA5782-6648 | mAsmCsmGsUCCACGGCUGUUUCUGAAGUUUUAGUACUCUGUAAUGAAA | 819 |
| | AUUACAGAAUCUACUAAAACAAGGCAAAAUGCCGUGUUUAUCUCGUCAA | |
| | CUUGUUGGCGAGAUsmUsmUsmU | |
| gRNA5783-6649 | mCsmCsmAsCGGCUGUUUCUGAACAAGUUUUAGAGCUAGAAAUAGCAAG | 820 |
| | UUAAAAUAAGGCUAGUCCGUUAUCAACUUGAAAAAGUGGCACCGAGUCG | |
| | GUGCmUsmUsmUsU | |
| gRNA5784-6650 | mGsmAsmCsGUCCACGGCUGUUUCUGGUUUUAGAGCUAGAAAUAGCAAG | 821 |
| | UUAAAAUAAGGCUAGUCCGUUAUCAACUUGAAAAAGUGGCACCGAGUCG | |
| | GUGCmUsmUsmUsU | |
| gRNA5785-6651 | mGsmCsmGsACGUCCACGGCUGUUUCGUUUUAGAGCUAGAAAUAGCAAG | 822 |
| | UUAAAAUAAGGCUAGUCCGUUAUCAACUUGAAAAAGUGGCACCGAGUCG | |
| | GUGCmUsmUsmUsU | |
| gRNA5786-6652 | mUsmAsmCsUCAUUUGGGUAGUUUUCGUUUUAGAGCUAGAAAUAGCAAG | 823 |
| | UUAAAAUAAGGCUAGUCCGUUAUCAACUUGAAAAAGUGGCACCGAGUCG | |
| | GUGCmUsmUsmUsU | |
| gRNA5787-6653 | mAsmCsmUsCAUUUGGGUAGUUUUCUGUUUUAGAGCUAGAAAUAGCAAG | 824 |
| | UUAAAAUAAGGCUAGUCCGUUAUCAACUUGAAAAAGUGGCACCGAGUCG | |
| | GUGCmUsmUsmUsU | |
| gRNA5788-6654 | mCsmUsmCsAUUUGGGUAGUUUUCUGGUUUUAGAGCUAGAAAUAGCAAG | 825 |
| | UUAAAAUAAGGCUAGUCCGUUAUCAACUUGAAAAAGUGGCACCGAGUCG | |
| | GUGCmUsmUsmUsU | |
| gRNA5789-6655 | mAsmUsmAsCUCAUUUGGGUAGUUUUCGUUUUAGUACUCUGUAAUGAAA | 826 |
| | AUUACAGAAUCUACUAAAACAAGGCAAAAUGCCGUGUUUAUCUCGUCAA | |
| | CUUGUUGGCGAGAUsmUsmUsmU | |
| gRNA5790-6656 | mUsmCsmAsUUUGGGUAGUUUUCUGGGUUUUAGAGCUAGAAAUAGCAAG | 827 |
| | UUAAAAUAAGGCUAGUCCGUUAUCAACUUGAAAAAGUGGCACCGAGUCG | |
| | GUGCmUsmUsmUsU | |
| gRNA5791-6657 | mAsmGsmUsAACAGUGGUUGCCUUCUGUUUUAGAGCUAGAAAUAGCAAG | 828 |
| | UUAAAAUAAGGCUAGUCCGUUAUCAACUUGAAAAAGUGGCACCGAGUCG | |
| | GUGCmUsmUsmUsU | |
| gRNA5792-6658 | mCsmUsmGsCGUCUGAGCAUUGCGUCGUUUUAGAGCUAGAAAUAGCAAG | 829 |
| | UUAAAAUAAGGCUAGUCCGUUAUCAACUUGAAAAAGUGGCACCGAGUCG | |
| | GUGCmUsmUsmUsU | |
| gRNA5793-6659 | mCsmUsmUsCUGCGUCUGAGCAUUGCGGUUUUAGUACUCUGUAAUGAAA | 830 |
| | AUUACAGAAUCUACUAAAACAAGGCAAAAUGCCGUGUUUAUCUCGUCAA | |
| | CUUGUUGGCGAGAUsmUsmUsmU | |
| gRNA5794-6660 | mCsmCsmUsUCUGCGUCUGAGCAUUGGUUUUAGAGCUAGAAAUAGCAAG | 831 |
| | UUAAAAUAAGGCUAGUCCGUUAUCAACUUGAAAAAGUGGCACCGAGUCG | |
| | GUGCmUsmUsmUsU | |
| gRNA5795-6661 | mAsmUsmGsUGCCUCGGUAACUCUGUCGUUUUAGUACUCUGUAAUGAAA | 832 |
| | AUUACAGAAUCUACUAAAACAAGGCAAAAUGCCGUGUUUAUCUCGUCAA | |
| | CUUGUUGGCGAGAUsmUsmUsmU | |
| gRNA5796-6662 | mUsmGsmCsCUCGGUAACUCUGUCCAUGUUUUAGUACUCUGUAAUGAAA | 833 |
| | AUUACAGAAUCUACUAAAACAAGGCAAAAUGCCGUGUUUAUCUCGUCAA | |
| | CUUGUUGGCGAGAUsmUsmUsmU | |
| gRNA5797-6663 | mCsmUsmCsGGUAACUCUGUCCAUAAUGUUUUAGUACUCUGUAAUGAAA | 834 |
| | AUUACAGAAUCUACUAAAACAAGGCAAAAUGCCGUGUUUAUCUCGUCAA | |
| | CUUGUUGGCGAGAUsmUsmUsmU | |
| gRNA5798-6664 | mCsmUsmCsGGUAACUCUGUCCAUAAGUUUUAGAGCUAGAAAUAGCAAG | 835 |
| | UUAAAAUAAGGCUAGUCCGUUAUCAACUUGAAAAAGUGGCACCGAGUCG | |
| | GUGCmUsmUsmUsU | |
| gRNA5799-6665 | mGsmGsmUsAAUGGCCAGAGUUAUCGGUUUUAGAGCUAGAAAUAGCAAG | 836 |
| | UUAAAAUAAGGCUAGUCCGUUAUCAACUUGAAAAAGUGGCACCGAGUCG | |
| | GUGCmUsmUsmUsU | |
| gRNA5800-6666 | mGsmUsmAsAUGGCCAGAGUUAUCGAGUUUUAGAGCUAGAAAUAGCAAG | 837 |
| | UUAAAAUAAGGCUAGUCCGUUAUCAACUUGAAAAAGUGGCACCGAGUCG | |
| | GUGCmUsmUsmUsU | |
| gRNA5801-6667 | mAsmAsmUsGGCCAGAGUUAUCGAGGGUUUUAGAGCUAGAAAUAGCAAG | 838 |
| | UUAAAAUAAGGCUAGUCCGUUAUCAACUUGAAAAAGUGGCACCGAGUCG | |
| | GUGCmUsmUsmUsU | |
| gRNA5802-6668 | mAsmUsmGsGUAAUGGCCAGAGUUAUGUUUUAGAGCUAGAAAUAGCAAG | 839 |
| | UUAAAAUAAGGCUAGUCCGUUAUCAACUUGAAAAAGUGGCACCGAGUCG | |
| | GUGCmUsmUsmUsU | |
| gRNA5803-6669 | mCsmGsmUsCCCUCCGAAUGUUAUUCGUUUUAGAGCUAGAAAUAGCAAG | 840 |
| | UUAAAAUAAGGCUAGUCCGUUAUCAACUUGAAAAAGUGGCACCGAGUCG | |
| | GUGCmUsmUsmUsU | |
| gRNA5804-6670 | mGsmUsmCsCCUCCGAAUGUUAUUCUGUUUUAGAGCUAGAAAUAGCAAG | 841 |
| | UUAAAAUAAGGCUAGUCCGUUAUCAACUUGAAAAAGUGGCACCGAGUCG | |
| | GUGCmUsmUsmUsU | |
| gRNA5805-6671 | mGsmUsmGsAUGGACAGAGUUAUCGAGUUUUAGAGCUAGAAAUAGCAAG | 842 |
| | UUAAAAUAAGGCUAGUCCGUUAUCAACUUGAAAAAGUGGCACCGAGUCG | |
| | GUGCmUsmUsmUsU | |
| gRNA5806-6672 | mUsmGsmGsACAGAGUUAUCGAGGCAGUUUUAGAGCUAGAAAUAGCAAG | 843 |
| | UUAAAAUAAGGCUAGUCCGUUAUCAACUUGAAAAAGUGGCACCGAGUCG | |
| | GUGCmUsmUsmUsU | |
| gRNA5807-6673 | mGsmGsmUsGAUGGACAGAGUUAUCGGUUUUAGAGCUAGAAAUAGCAAG | 844 |
| | UUAAAAUAAGGCUAGUCCGUUAUCAACUUGAAAAAGUGGCACCGAGUCG | |
| | GUGCmUsmUsmUsU | |
| gRNA5808-6674 | mGsmAsmGsGUGAUGGACAGAGUUAUGUUUUAGAGCUAGAAAUAGCAAG | 845 |
| | UUAAAAUAAGGCUAGUCCGUUAUCAACUUGAAAAAGUGGCACCGAGUCG | |
| | GUGCmUsmUsmUsU | |
| gRNA5809-6675 | mAsmCsmAsCACUUUCUGGGCACUGCGUUUUAGAGCUAGAAAUAGCAAG | 846 |
| | UUAAAAUAAGGCUAGUCCGUUAUCAACUUGAAAAAGUGGCACCGAGUCG | |
| | GUGCmUsmUsmUsU | |
| gRNA5810-6676 | mGsmGsmGsACACACUUUCUGGGCACGUUUUAGAGCUAGAAAUAGCAAG | 847 |
| | UUAAAAUAAGGCUAGUCCGUUAUCAACUUGAAAAAGUGGCACCGAGUCG | |
| | GUGCmUsmUsmUsU | |
| gRNA5811-6677 | mGsmGsmGsAUUGGGACACACUUUCUGUUUUAGAGCUAGAAAUAGCAAG | 848 |
| | UUAAAAUAAGGCUAGUCCGUUAUCAACUUGAAAAAGUGGCACCGAGUCG | |
| | GUGCmUsmUsmUsU | |
| gRNA5812-6678 | mGsmGsmAsUUGGGACACACUUUCUGGUUUUAGAGCUAGAAAUAGCAAG | 849 |
| | UUAAAAUAAGGCUAGUCCGUUAUCAACUUGAAAAAGUGGCACCGAGUCG | |
| | GUGCmUsmUsmUsU | |
| gRNA5813-6679 | mAsmUsmUsGGGACACACUUUCUGGGGUUUUAGAGCUAGAAAUAGCAAG | 850 |
| | UUAAAAUAAGGCUAGUCCGUUAUCAACUUGAAAAAGUGGCACCGAGUCG | |
| | GUGCmUsmUsmUsU | |
| gRNA5814-6680 | mUsmGsmGsGAUUGGGACACACUUUCGUUUUAGAGCUAGAAAUAGCAAG | 851 |
| | UUAAAAUAAGGCUAGUCCGUUAUCAACUUGAAAAAGUGGCACCGAGUCG | |
| | GUGCmUsmUsmUsU | |
| gRNA5815-6681 | mAsmUsmGsCCUCGCCCUGCUUCGGCGUUUUAGAGCUAGAAAUAGCAAG | 852 |
| | UUAAAAUAAGGCUAGUCCGUUAUCAACUUGAAAAAGUGGCACCGAGUCG | |
| | GUGCmUsmUsmUsU | |
| gRNA5816-6682 | mUsmGsmCsCUCGCCCUGCUUCGGCUGUUUUAGAGCUAGAAAUAGCAAG | 853 |
| | UUAAAAUAAGGCUAGUCCGUUAUCAACUUGAAAAAGUGGCACCGAGUCG | |
| | GUGCmUsmUsmUsU | |
| gRNA5817-6683 | mCsmCsmUsCGCCCUGCUUCGGCUGGGUUUUAGAGCUAGAAAUAGCAAG | 854 |
| | UUAAAAUAAGGCUAGUCCGUUAUCAACUUGAAAAAGUGGCACCGAGUCG | |
| | GUGCmUsmUsmUsU | |
| gRNA5818-6684 | mCsmUsmCsGCCCUGCUUCGGCUGGCGGUUUUAGUACUCUGUAAUGAAA | 855 |
| | AUUACAGAAUCUACUAAAACAAGGCAAAAUGCCGUGUUUAUCUCGUCAA | |
| | CUUGUUGGCGAGAUsmUsmUsmU | |
| gRNA5819-6685 | mUsmCsmGsCCCUGCUUCGGCUGGCGGUUUUAGAGCUAGAAAUAGCAAG | 856 |
| | UUAAAAUAAGGCUAGUCCGUUAUCAACUUGAAAAAGUGGCACCGAGUCG | |
| | GUGCmUsmUsmUsU | |
| gRNA5820-6686 | mGsmGsmCsAAUGCCUCGCCCUGCUUGUUUUAGAGCUAGAAAUAGCAAG | 857 |
| | UUAAAAUAAGGCUAGUCCGUUAUCAACUUGAAAAAGUGGCACCGAGUCG | |
| | GUGCmUsmUsmUsU | |
| gRNA5821-6687 | mGsmGsmUsCACUCCCACCCGAAUACGUUUUAGAGCUAGAAAUAGCAAG | 858 |
| | UUAAAAUAAGGCUAGUCCGUUAUCAACUUGAAAAAGUGGCACCGAGUCG | |
| | GUGCmUsmUsmUsU | |
| gRNA5822-6688 | mUsmCsmGsGGUCACUCCCACCCGAAGUUUUAGAGCUAGAAAUAGCAAG | 859 |
| | UUAAAAUAAGGCUAGUCCGUUAUCAACUUGAAAAAGUGGCACCGAGUCG | |
| | GUGCmUsmUsmUsU | |
| gRNA5823-6689 | mAsmAsmAsAUCGGGUCACUCCCACCGUUUUAGAGCUAGAAAUAGCAAG | 860 |
| | UUAAAAUAAGGCUAGUCCGUUAUCAACUUGAAAAAGUGGCACCGAGUCG | |
| | GUGCmUsmUsmUsU | |
| gRNA5824-6690 | mUsmGsmGsAUUUCGGCAGUAGUUCUGUUUUAGAGCUAGAAAUAGCAAG | 861 |
| | UUAAAAUAAGGCUAGUCCGUUAUCAACUUGAAAAAGUGGCACCGAGUCG | |
| | GUGCmUsmUsmUsU | |
| gRNA5825-6691 | mAsmUsmCsUGGAUUUCGGCAGUAGUUGUUUUAGUACUCUGUAAUGAAA | 862 |
| | AUUACAGAAUCUACUAAAACAAGGCAAAAUGCCGUGUUUAUCUCGUCAA | |
| | CUUGUUGGCGAGAUsmUsmUsmU | |
| gRNA5826-6692 | mGsmAsmAsCAAAGACGUACGCAUUUGUUUUAGAGCUAGAAAUAGCAAG | 863 |
| | UUAAAAUAAGGCUAGUCCGUUAUCAACUUGAAAAAGUGGCACCGAGUCG | |
| | GUGCmUsmUsmUsU | |
| gRNA5827-6693 | mAsmAsmAsGAACAAAGACGUACGCAUGUUUUAGUACUCUGUAAUGAAA | 864 |
| | AUUACAGAAUCUACUAAAACAAGGCAAAAUGCCGUGUUUAUCUCGUCAA | |
| | CUUGUUGGCGAGAUsmUsmUsmU | |
| gRNA5828-6694 | mGsmAsmAsCAAAGACGUACGCAUUUGGUUUUAGUACUCUGUAAUGAAA | 865 |
| | AUUACAGAAUCUACUAAAACAAGGCAAAAUGCCGUGUUUAUCUCGUCAA | |
| | CUUGUUGGCGAGAUsmUsmUsmU | |
| gRNA5829-6695 | mAsmAsmCsAAAGACGUACGCAUUUGGUUUUAGAGCUAGAAAUAGCAAG | 866 |
| | UUAAAAUAAGGCUAGUCCGUUAUCAACUUGAAAAAGUGGCACCGAGUCG | |
| | GUGCmUsmUsmUsU | |
| gRNA5830-6696 | mAsmAsmAsGACGUACGCAUUUGGGUGUUUUAGAGCUAGAAAUAGCAAG | 867 |
| | UUAAAAUAAGGCUAGUCCGUUAUCAACUUGAAAAAGUGGCACCGAGUCG | |
| | GUGCmUsmUsmUsU | |
| gRNA5831-6697 | mAsmGsmAsACAAAGACGUACGCAUUGUUUUAGAGCUAGAAAUAGCAAG | 868 |
| | UUAAAAUAAGGCUAGUCCGUUAUCAACUUGAAAAAGUGGCACCGAGUCG | |
| | GUGCmUsmUsmUsU | |
| gRNA3489-6698 | mUsmAsmAsCACCAAGGACUAAUCUCGUUUUAGAGCUAGAAAUAGCAAG | 869 |
| | UUAAAAUAAGGCUAGUCCGUUAUCAACUUGAAAAAGUGGCACCGAGUCG | |
| | GUGCmUsmUsmUsU | |
| gRNA5832-6699 | mGsmAsmUsCCAUGGUAUAACACCAAGUUUUAGAGCUAGAAAUAGCAAG | 870 |
| | UUAAAAUAAGGCUAGUCCGUUAUCAACUUGAAAAAGUGGCACCGAGUCG | |
| | GUGCmUsmUsmUsU | |
| gRNA5833-6700 | mGsmCsmGsAUGCUCAGACACAGAAGGUUUUAGAGCUAGAAAUAGCAAG | 871 |
| | UUAAAAUAAGGCUAGUCCGUUAUCAACUUGAAAAAGUGGCACCGAGUCG | |
| | GUGCmUsmUsmUsU | |
| gRNA5834-6701 | mAsmUsmGsCUCAGACACAGAAGGGACGUUUUAGUACUCUGUAAUGAAA | 872 |
| | AUUACAGAAUCUACUAAAACAAGGCAAAAUGCCGUGUUUAUCUCGUCAA | |
| | CUUGUUGGCGAGAUsmUsmUsmU | |
| gRNA4122-6702 | mUsmGsmCsUCAGACACAGAAGGGACGUUUUAGAGCUAGAAAUAGCAAG | 873 |
| | UUAAAAUAAGGCUAGUCCGUUAUCAACUUGAAAAAGUGGCACCGAGUCG | |
| | GUGCmUsmUsmUsU | |
| gRNA5835-6703 | mCsmGsmAsUGCUCAGACACAGAAGGGUUUUAGAGCUAGAAAUAGCAAG | 874 |
| | UUAAAAUAAGGCUAGUCCGUUAUCAACUUGAAAAAGUGGCACCGAGUCG | |
| | GUGCmUsmUsmUsU | |
| gRNA3431-6704 | mAsmCsmGsCGAUGCUCAGACACAGAGUUUUAGAGCUAGAAAUAGCAAG | 875 |
| | UUAAAAUAAGGCUAGUCCGUUAUCAACUUGAAAAAGUGGCACCGAGUCG | |
| | GUGCmUsmUsmUsU | |
| gRNA5836-6705 | mCsmGsmCsGAUGCUCAGACACAGAAGUUUUAGAGCUAGAAAUAGCAAG | 876 |
| | UUAAAAUAAGGCUAGUCCGUUAUCAACUUGAAAAAGUGGCACCGAGUCG | |
| | GUGCmUsmUsmUsU | |
| gRNA5837-6706 | mCsmUsmCsAGACACAGAAGGGACUGGUUUUAGAGCUAGAAAUAGCAAG | 877 |
| | UUAAAAUAAGGCUAGUCCGUUAUCAACUUGAAAAAGUGGCACCGAGUCG | |
| | GUGCmUsmUsmUsU | |
| gRNA3454-6707 | mCsmUsmGsACGCGAUGCUCAGACACGUUUUAGAGCUAGAAAUAGCAAG | 878 |
| | UUAAAAUAAGGCUAGUCCGUUAUCAACUUGAAAAAGUGGCACCGAGUCG | |
| | GUGCmUsmUsmUsU | |
| gRNA5838-6708 | mAsmAsmCsAAGGAGCUGGGCUUCCUGUUUUAGAGCUAGAAAUAGCAAG | 879 |
| | UUAAAAUAAGGCUAGUCCGUUAUCAACUUGAAAAAGUGGCACCGAGUCG | |
| | GUGCmUsmUsmUsU | |
| gRNA5839-6709 | mCsmAsmAsGGAGCUGGGCUUCCUUGGUUUUAGAGCUAGAAAUAGCAAG | 880 |
| | UUAAAAUAAGGCUAGUCCGUUAUCAACUUGAAAAAGUGGCACCGAGUCG | |
| | GUGCmUsmUsmUsU | |
| gRNA5840-6710 | mCsmAsmUsUCUCAAUAACAAGGAGCGUUUUAGAGCUAGAAAUAGCAAG | 881 |
| | UUAAAAUAAGGCUAGUCCGUUAUCAACUUGAAAAAGUGGCACCGAGUCG | |
| | GUGCmUsmUsmUsU | |
| gRNA5841-6711 | mAsmUsmUsCUCAAUAACAAGGAGCUGUUUUAGAGCUAGAAAUAGCAAG | 882 |
| | UUAAAAUAAGGCUAGUCCGUUAUCAACUUGAAAAAGUGGCACCGAGUCG | |
| | GUGCmUsmUsmUsU | |
| gRNA5842-6712 | mUsmCsmUsUACCUGGCAACUGUCAGGUUUUAGAGCUAGAAAUAGCAAG | 883 |
| | UUAAAAUAAGGCUAGUCCGUUAUCAACUUGAAAAAGUGGCACCGAGUCG | |
| | GUGCmUsmUsmUsU | |
| gRNA5843-6713 | mUsmUsmUsCUUACCUGGCAACUGUCGUUUUAGAGCUAGAAAUAGCAAG | 884 |
| | UUAAAAUAAGGCUAGUCCGUUAUCAACUUGAAAAAGUGGCACCGAGUCG | |
| | GUGCmUsmUsmUsU | |
| gRNA5844-6714 | mGsmUsmGsUCUAUGCUCGUGUUUCAGUUUUAGAGCUAGAAAUAGCAAG | 885 |
| | UUAAAAUAAGGCUAGUCCGUUAUCAACUUGAAAAAGUGGCACCGAGUCG | |
| | GUGCmUsmUsmUsU | |
| gRNA5845-6715 | mCsmUsmGsGUGUCUAUGCUCGUGUUUGUUUUAGUACUCUGUAAUGAAA | 886 |
| | AUUACAGAAUCUACUAAAACAAGGCAAAAUGCCGUGUUUAUCUCGUCAA | |
| | CUUGUUGGCGAGAUsmUsmUsmU | |
| gRNA5846-6716 | mUsmGsmUsCUAUGCUCGUGUUUCAAGUUUUAGAGCUAGAAAUAGCAAG | 887 |
| | UUAAAAUAAGGCUAGUCCGUUAUCAACUUGAAAAAGUGGCACCGAGUCG | |
| | GUGCmUsmUsmUsU | |

TABLE 1A-2
Exemplary spacer sequences and their corresponding target sequences for use
in targeting a base editor to introduce a single nucleotide polymorphism (SNP) to an LPA
polynucleotide. In embodiments, the SNP is associated with a reduction in incidence of
cardiovascular disease in a subject. In some cases, the SNP is associated with a reduction
in serum concentrations of LPA in a subject and/or in a reduction in risk for coronary heart
disease (CHD).

| | | | | PAM | PAM |
|---|---|---|---|---|---|
| | Target SNP | Base Editor | napDN | Sequence | Se- |
| Guide Name | Introduction | Name | ANbp | Family | quence |
| CBE_NGA_20nt_4-9_006_- | chr6: 1605771 | spCas9 VRQR | spCas9 | NGA | AGA |
| 160577150_spCas9 | 67: G > A | CBE | | | |
| CBE_NG_20nt_4-9_028_- | chr6: 1605771 | spCas9 NG | spCas9 | NG | AG |
| 160577151_spCas9 | 67: G > A | CBE | | | |
| CBE_NGA_20nt_3-16_035_- | chr6: 1605771 | spCas9 IBE | spCas9 | NGA | AGA |
| 160577150_spCas9 | 67: G > A | extended CBE | | | |
| CBE_NRCH_20nt_3-9_030_- | chr6: 1605771 | spCas9 NRCH | spCas9 | NRCH | AACT |
| 160577145_spCas9 | 67: G > A | CBE | | | |
| CBE_NGG_20nt_3-16_033_- | chr6: 1605771 | SpCas9 IBE | SpCas9 | NGG | AGG |
| 160577158_SpCas9 | 67: G > A | CBE | | | |
| CBE_NGA_20nt_3-16_035_- | chr6: 1605771 | spCas9 IBE | spCas9 | NGA | GGA |
| 160577157_spCas9 | 67: G > A | extended CBE | | | |
| CBE_NGA_20nt_4- | chr6: 1605772 | spCas9 VRQR | spCas9 | NGA | TGA |
| 9_006_+_160577276_spCas9 | 80: C > T | CBE | | | |
| CBE_NG_20nt_4- | chr6: 1605772 | spCas9 NG | spCas9 | NG | TG |
| 9_028_+_160577276_spCas9 | 80: C > T | CBE | | | |
| CBE_NGA_20nt_3- | chr6: 1605772 | spCas9 IBE | spCas9 | NGA | TGA |
| 16_035_+_160577276_spCas9 | 80: C > T | extended CBE | | | |
| CBE_NGC_20nt_4- | chr6: 1605772 | spCas9 NGC | spCas9 | NGC | TGC |
| 9_009_+_160577273_spCas9 | 80: C > T | CBE | | | |
| CBE_NG_20nt_4- | chr6: 1605772 | spCas9 NG | spCas9 | NG | TG |
| 9_028_+_160577273_spCas9 | 80: C > T | CBE | | | |
| CBE_NRCH_20nt_3- | chr6: 1605772 | spCas9 NRCH | spCas9 | NRCH | TGCT |
| 9_030_+_160577273_spCas9 | 80: C > T | CBE | | | |
| CBE_NNNRRT_21nt_3- | chr6: 1605772 | saCas9 KKH | saCas9 | NNNRRT | TGAAAT |
| 12_015_+_160577275_saCas9 | 80: C > T | CBE | | | |
| CBE_NG_20nt_4- | chr6: 1605772 | spCas9 NG | spCas9 | NG | GG |
| 9_028_+_160577271_spCas9 | 80: C > T | CBE | | | |
| CBE_NGG_20nt_3- | chr6: 1605772 | SpCas9 IBE | SpCas9 | NGG | AGG |
| 16_033_+_160577267_SpCas9 | 80: C > T | CBE | | | |
| CBE_NGG_20nt_3- | chr6: 1605772 | SpCas9 IBE | SpCas9 | NGG | TGG |
| 16_033_+_160577270_SpCas9 | 80: C > T | CBE | | | |
| ABE_NGA_20nt_3-9_005_- | chr6: 1605895 | spCas9 VRQR | spCas9 | NGA | AGA |
| 160589567_spCas9 | 83: T > C | ABE | | | |
| ABE_NG_20nt_3-9_027_- | chr6: 1605895 | spCas9 NG | spCas9 | NG | AG |
| 160589568_spCas9 | 83: T > C | ABE | | | |
| ABE_NGA_20nt_3-12_019_- | chr6: 1605895 | spCas9 VRQR | spCas9 | NGA | AGA |
| 160589567_spCas9 | 83: T > C | IBE | | | |
| ABE_NNGRRT_21nt_5- | chr6: 1605895 | saCas9 ABE | saCas9 | NNGRRT | CAGAAT |
| 14_011_−_160589565_saCas9 | 83: T > C | | | | |
| ABE_NRCH_20nt_3-9_024_- | chr6: 1605895 | spCas9 NRCH | spCas9 | NRCH | TACT |
| 160589562_spCas9 | 83: T > C | ABE | | | |
| ABE_NGA_20nt_13-16_034_- | chr6: 1605895 | SpCas9 IBE | SpCas9 | NGA | AGA |
| 160589575_SpCas9 | 83: T > C | expanded ABE | | | |
| CBE_NGA_20nt_4-9_006_- | chr6: 1605455 | spCas9 VRQR | spCas9 | NGA | TGA |
| 160545510_spCas9 | 27: G > A | CBE | | | |
| CBE_NG_20nt_4-9_028_- | chr6: 1605455 | spCas9 NG | spCas9 | NG | TG |
| 160545511_spCas9 | 27: G > A | CBE | | | |
| CBE_NGA_20nt_3-16_035_- | chr6: 1605455 | spCas9 IBE | spCas9 | NGA | TGA |
| 160545510_spCas9 | 27: G > A | extended CBE | | | |
| CBE_NNNRRT_21nt_3- | chr6: 1605455 | saCas9 KKH | saCas9 | NNNRRT | ATCAAT |
| 12_015_−_160545503_saCas9 | 27: G > A | CBE | | | |
| CBE_NG_20nt_4-9_028_- | chr6: 1605455 | spCas9 NG | spCas9 | NG | GG |
| 160545513_spCas9 | 27: G > A | CBE | | | |
| CBE_NRCH_20nt_3-9_030_- | chr6: 1605455 | spCas9 NRCH | spCas9 | NRCH | GACA |
| 160545508_spCas9 | 27: G > A | CBE | | | |
| CBE_NGG_20nt_3-16_033_- | chr6: 1605455 | SpCas9 IBE | SpCas9 | NGG | TGG |
| 160545513_SpCas9 | 27: G > A | CBE | | | |
| CBE_NGA_20nt_3-16_035_- | chr6: 1605455 | spCas9 IBE | spCas9 | NGA | TGA |
| 160545516_spCas9 | 27: G > A | extended CBE | | | |
| CBE_NGG_20nt_4-9_003_- | chr6: 1606351 | spCas9 CBE | spCas9 | NGG | AGG |
| 160635116_spCas9 | 34: G > A | | | | |
| CBE_NG_20nt_4-9_028_- | chr6: 1606351 | spCas9 NG | spCas9 | NG | AG |
| 160635117_spCas9 | 34: G > A | CBE | | | |
| CBE_NGG_20nt_3-16_033_- | chr6: 1606351 | SpCas9 IBE | SpCas9 | NGG | AGG |
| 160635116_SpCas9 | 34: G > A | CBE | | | |
| CBE_NGG_20nt_4-9_003_- | chr6: 1606351 | spCas9 CBE | spCas9 | NGG | AGG |
| 160635116_spCas9 | 35: G > A | | | | |
| CBE_NG_20nt_4-9_028_- | chr6: 1606351 | spCas9 NG | spCas9 | NG | AG |
| 160635117_spCas9 | 35: G > A | CBE | | | |
| CBE_NGG_20nt_3-16_033_- | chr6: 1606351 | SpCas9 IBE | SpCas9 | NGG | AGG |
| 160635116_SpCas9 | 35: G > A | CBE | | | |
| CBE_NGA_20nt_4-9_006_- | chr6: 1606351 | spCas9 VRQR | spCas9 | NGA | GGA |
| 160635115_spCas9 | 34: G > A | CBE | | | |
| CBE_NG_20nt_4-9_028_- | chr6: 1606351 | spCas9 NG | spCas9 | NG | GG |
| 160635116_spCas9 | 34: G > A | CBE | | | |
| CBE_NGA_20nt_3-16_035_- | chr6: 1606351 | spCas9 IBE | spCas9 | NGA | GGA |
| 160635115_spCas9 | 34: G > A | extended CBE | | | |
| CBE_NGA_20nt_4-9_006_- | chr6: 1606351 | spCas9 VRQR | spCas9 | NGA | GGA |
| 160635115_spCas9 | 35: G > A | CBE | | | |
| CBE_NG_20nt_4-9_028_- | chr6: 1606351 | spCas9 NG | spCas9 | NG | GG |
| 160635116_spCas9 | 35: G > A | CBE | | | |
| CBE_NGA_20nt_3-16_035_- | chr6: 1606351 | spCas9 IBE | spCas9 | NGA | GGA |
| 160635115_spCas9 | 35: G > A | extended CBE | | | |
| CBE_NNGRRT_21nt_3- | chr6: 1606351 | saCas9 CBE | saCas9 | NNGRRT | AGGAGT |
| 12_012_−_160635113_saCas9 | 34: G > A | | | | |
| CBE_NNGRRT_21nt_3- | chr6: 1606351 | saCas9 CBE | saCas9 | NNGRRT | AGGAGT |
| 12_012_−_160635113_saCas9 | 35: G > A | | | | |
| CBE_NGG_20nt_3-16_033_- | chr6: 1606351 | SpCas9 IBE | SpCas9 | NGG | AGG |
| 160635121_SpCas9 | 34: G > A | CBE | | | |
| CBE_NGG_20nt_3-16_033_- | chr6: 1606351 | SpCas9 IBE | SpCas9 | NGG | AGG |
| 160635121_SpCas9 | 35: G > A | CBE | | | |
| CBE_NG_20nt_4-9_028_- | chr6: 1606351 | spCas9 NG | spCas9 | NG | GG |
| 160635121_spCas9 | 35: G > A | CBE | | | |
| CBE_NGA_20nt_3-16_035_- | chr6: 1606351 | spCas9 IBE | spCas9 | NGA | CGA |
| 160635127_spCas9 | 35: G > A | extended CBE | | | |
| CBE_NGG_20nt_4-9_003_- | chr6: 1605909 | spCas9 CBE | spCas9 | NGG | AGG |
| 160590942_spCas9 | 61: G > A | | | | |
| CBE_NG_20nt_4-9_028_- | chr6: 1605909 | spCas9 NG | spCas9 | NG | AG |
| 160590943_spCas9 | 61: G > A | CBE | | | |
| CBE_NGG_20nt_3-16_033_- | chr6: 1605909 | SpCas9 IBE | SpCas9 | NGG | AGG |
| 160590942_SpCas9 | 61: G > A | CBE | | | |
| CBE_NNNRRT_21nt_3- | chr6: 1605909 | saCas9 KKH | saCas9 | NNNRRT | CAAGGT |
| 12_015_−_160590941_saCas9 | 61: G > A | CBE | | | |
| CBE_NG_20nt_4-9_028_- | chr6: 1605909 | spCas9 NG | spCas9 | NG | GG |
| 160590942_spCas9 | 61: G > A | CBE | | | |
| CBE_NRCH_20nt_3-9_030_- | chr6: 1605909 | spCas9 NRCH | spCas9 | NRCH | AACA |
| 160590945_spCas9 | 61: G > A | CBE | | | |
| CBE_NGA_20nt_3-16_035_- | chr6: 1605909 | spCas9 IBE | spCas9 | NGA | TGA |
| 160590948_spCas9 | 61: G > A | extended CBE | | | |
| ABE_NGG_20nt_3- | chr6: 1605560 | spCas9 ABE | spCas9 | NGG | TGG |
| 9_002_+_160556021_spCas9 | 27: A > G | | | | |
| ABE_NG_20nt_3- | chr6: 1605560 | spCas9 NG | spCas9 | NG | TG |
| 9_027_+_160556021_spCas9 | 27: A > G | ABE | | | |
| ABE_NGG_20nt_3- | chr6: 1605560 | spCas9 IBE | spCas9 | NGG | TGG |
| 12_018_+_160556021_spCas9 | 27: A > G | | | | |
| ABE_NGG_20nt_3- | chr6: 1605560 | spCas9 ABE | spCas9 | NGG | GGG |
| 9_002_+_160556022_spCas9 | 27: A > G | | | | |
| ABE_NG_20nt_3- | chr6: 1605560 | spCas9 NG | spCas9 | NG | GG |
| 9_027_+_160556022_spCas9 | 27: A > G | ABE | | | |
| ABE_NGG_20nt_3- | chr6: 1605560 | spCas9 IBE | spCas9 | NGG | GGG |
| 12_018_+_160556022_spCas9 | 27: A > G | | | | |
| ABE_NGG_20nt_3- | chr6: 1605560 | spCas9 ABE | spCas9 | NGG | GGG |
| 9_002_+_160556023_spCas9 | 27: A > G | | | | |
| ABE_NG_20nt_3- | chr6: 1605560 | spCas9 NG | spCas9 | NG | GG |
| 9_027_+_160556023_spCas9 | 27: A > G | ABE | | | |
| ABE_NGG_20nt_3- | chr6: 1605560 | spCas9 IBE | spCas9 | NGG | GGG |
| 12_018_+_160556023_spCas9 | 27: A > G | | | | |
| ABE_NNGRRT_21nt_5- | chr6: 1605560 | saCas9 ABE | saCas9 | NNGRRT | TGGGGT |
| 14_011_+_160556020_saCas9 | 27: A > G | | | | |
| ABE_NG_20nt_3- | chr6: 1605560 | spCas9 NG | spCas9 | NG | GG |
| 9_027_+_160556024_spCas9 | 27: A > G | ABE | | | |
| ABE_NGC_20nt_3- | chr6: 1605478 | spCas9 NGC | spCas9 | NGC | TGC |
| 9_008_+_160547881_spCas9 | 86: A > G | ABE | | | |
| ABE_NG_20nt_3- | chr6: 1605478 | spCas9 NG | spCas9 | NG | TG |
| 9_027_+_160547881_spCas9 | 86: A > G | ABE | | | |
| ABE_NGC_20nt_3- | chr6: 1605478 | spCas9 NGC | spCas9 | NGC | TGC |
| 12_020_+_160547881_spCas9 | 86: A > G | IBE | | | |
| ABE_NRCH_20nt_3- | chr6: 1605478 | spCas9 NRCH | spCas9 | NRCH | TGCC |
| 9_024_+_160547881_spCas9 | 86: A > G | ABE | | | |
| CBE_NGG_20nt_4- | chr6: 1606351 | spCas9 CBE | spCas9 | NGG | AGG |
| 9_003_+_160635188_spCas9 | 92: C > T | | | | |
| CBE_NG_20nt_4- | chr6: 1606351 | spCas9 NG | spCas9 | NG | AG |
| 9_028_+_160635188_spCas9 | 92: C > T | CBE | | | |
| CBE_NGG_20nt_3- | chr6: 1606351 | SpCas9 IBE | SpCas9 | NGG | AGG |
| 16_033_+_160635188_SpCas9 | 92: C > T | CBE | | | |
| CBE_NNNRRT_21nt_3- | chr6: 1606351 | saCas9 KKH | saCas9 | NNNRRT | TCAGGT |
| 12_015_+_160635185_saCas9 | 92: C > T | CBE | | | |
| CBE_NG_20nt_4- | chr6: 1606351 | spCas9 NG | spCas9 | NG | CG |
| 9_028_+_160635184_spCas9 | 92: C > T | CBE | | | |
| CBE_NNNRRT_21nt_3- | chr6: 1605995 | saCas9 KKH | saCas9 | NNNRRT | CATAAT |
| 12_015_+_160599590_saCas9 | 99: C > T | CBE | | | |
| CBE_NNNRRT_21nt_3- | chr6: 1605995 | saCas9 KKH | saCas9 | NNNRRT | AATGGT |
| 12_015_+_160599593_saCas9 | 99: C > T | CBE | | | |
| CBE_NNNRRT_21nt_3- | chr6: 1605995 | saCas9 KKH | saCas9 | NNNRRT | GGTAGT |
| 12_015_+_160599596_saCas9 | 99: C > T | CBE | | | |
| CBE_NGG_20nt_3- | chr6: 1605995 | SpCas9 IBE | SpCas9 | NGG | TGG |
| 16_033_+_160599596_SpCas9 | 99: C > T | CBE | | | |
| ABE_NGG_20nt_3-12_018_- | chr6: 1605561 | spCas9 IBE | spCas9 | NGG | AGG |
| 160556120_spCas9 | 33: T > C | | | | |
| ABE_NGC_20nt_3-12_020_- | chr6: 1605561 | spCas9 NGC | spCas9 | NGC | GGC |
| 160556119_spCas9 | 33: T > C | IBE | | | |
| ABE_NRCH_20nt_3-9_024_- | chr6: 1605561 | spCas9 NRCH | spCas9 | NRCH | CACA |
| 160556116_spCas9 | 33: T > C | ABE | | | |
| ABE_NGA_20nt_13-16_034_- | chr6: 1605561 | SpCas9 IBE | SpCas9 | NGA | CGA |
| 160556122_SpCas9 | 33: T > C | expanded ABE | | | |
| CBE_NGG_20nt_4-9_003_- | chr6: 1606009 | spCas9 CBE | spCas9 | NGG | TGG |
| 160600946_spCas9 | 61: G > A | | | | |
| CBE_NG_20nt_4-9_028_- | chr6: 1606009 | spCas9 NG | spCas9 | NG | TG |
| 160600947_spCas9 | 61: G > A | CBE | | | |
| CBE_NGG_20nt_3-16_033_- | chr6: 1606009 | SpCas9 IBE | SpCas9 | NGG | TGG |
| 160600946_SpCas9 | 61: G > A | CBE | | | |
| CBE_NGC_20nt_4-9_009_- | chr6: 1606009 | spCas9 NGC | spCas9 | NGC | GGC |
| 160600945_spCas9 | 61: G > A | CBE | | | |
| CBE_NG_20nt_4-9_028_- | chr6: 1606009 | spCas9 NG | spCas9 | NG | GG |
| 160600946_spCas9 | 61: G > A | CBE | | | |
| CBE_NRCH_20nt_3-9_030_- | chr6: 1606009 | spCas9 NRCH | spCas9 | NRCH | GGCT |
| 160600944_spCas9 | 61: G > A | CBE | | | |
| ABE_NGC_20nt_3-12_020_- | chr6: 1605851 | spCas9 NGC | spCas9 | NGC | GGC |
| 160585140_spCas9 | 52: T > C | IBE | | | |
| ABE_NRCH_20nt_3-9_024_- | chr6: 1605851 | spCas9 NRCH | spCas9 | NRCH | CACT |
| 160585135_spCas9 | 52: T > C | ABE | | | |
| ABE_NGG_20nt_13-16_032_- | chr6: 1605851 | SpCas9 | SpCas9 | NGG | AGG |
| 160585141_SpCas9 | 52: T > C | IBE_expanded | | | |
| | | ABE | | | |
| ABE_NGA_20nt_13-16_034_- | chr6: 1605851 | SpCas9 IBE | SpCas9 | NGA | CGA |
| 160585143_SpCas9 | 52: T > C | expanded ABE | | | |
| ABE_NGG_20nt_3-9_002_- | chr6: 1606642 | spCas9 ABE | spCas9 | NGG | TGG |
| 160664225_spCas9 | 46: T > C | | | | |
| ABE_NG_20nt_3-9_027_- | chr6: 1606642 | spCas9 NG | spCas9 | NG | TG |
| 160664226_spCas9 | 46: T > C | ABE | | | |
| ABE_NGG_20nt_3-12_018_- | chr6: 1606642 | spCas9 IBE | spCas9 | NGG | TGG |
| 160664225_spCas9 | 46: T > C | | | | |
| ABE_NGC_20nt_3-9_008_- | chr6: 1606642 | spCas9 NGC | spCas9 | NGC | TGC |
| 160664228_spCas9 | 46: T > C | ABE | | | |
| ABE_NG_20nt_3-9_027_- | chr6: 1606642 | spCas9 NG | spCas9 | NG | TG |
| 160664229_spCas9 | 46: T > C | ABE | | | |
| ABE_NGC_20nt_3-12_020_- | chr6: 1606642 | spCas9 NGC | spCas9 | NGC | TGC |
| 160664228_spCas9 | 46: T > C | IBE | | | |
| ABE_NRCH_20nt_3-9_024_- | chr6: 1606642 | spCas9 NRCH | spCas9 | NRCH | TGCT |
| 160664227_spCas9 | 46: T > C | ABE | | | |
| ABE_NGG_20nt_3-12_018_- | chr6: 1606642 | spCas9 IBE | spCas9 | NGG | GGG |
| 160664234_spCas9 | 46: T > C | | | | |
| ABE_NGC_20nt_3-12_020_- | chr6: 1606642 | spCas9 NGC | spCas9 | NGC | GGC |
| 160664233_spCas9 | 46: T > C | IBE | | | |
| ABE_NRCH_20nt_3-9_024_- | chr6: 1606642 | spCas9 NRCH | spCas9 | NRCH | CACT |
| 160664230_spCas9 | 46: T > C | ABE | | | |
| ABE_NGG_20nt_13-16_032_- | chr6: 1606642 | SpCas9 | SpCas9 | NGG | TGG |
| 160664235_SpCas9 | 46: T > C | IBE_expanded | | | |
| | | ABE | | | |
| CBE_NGG_20nt_4- | chr6: 1606855 | spCas9 CBE | spCas9 | NGG | TGG |
| 9_003_+_160685562_spCas9 | 71: C > T | | | | |
| CBE_NG_20nt_4- | chr6: 1606855 | spCas9 NG | spCas9 | NG | TG |
| 9_028_+_160685562_spCas9 | 71: C > T | CBE | | | |
| CBE_NGG_20nt_3- | chr6: 1606855 | SpCas9 IBE | SpCas9 | NGG | TGG |
| 16_033_+_160685562_SpCas9 | 71: C > T | CBE | | | |
| CBE_NGC_20nt_4- | chr6: 1606855 | spCas9 NGC | spCas9 | NGC | GGC |
| 9_009_+_160685563_spCas9 | 71: C > T | CBE | | | |
| CBE_NG_20nt_4- | chr6: 1606855 | spCas9 NG | spCas9 | NG | GG |
| 9_028_+_160685563_spCas9 | 71: C > T | CBE | | | |
| CBE_NGC_20nt_4- | chr6: 1606855 | spCas9 NGC | spCas9 | NGC | CGC |
| 9_009_+_160685565_spCas9 | 71: C > T | CBE | | | |
| CBE_NG_20nt_4- | chr6: 1606855 | spCas9 NG | spCas9 | NG | CG |
| 9_028_+_160685565_spCas9 | 71: C > T | CBE | | | |
| CBE_NRCH_20nt_3- | chr6: 1606855 | spCas9 NRCH | spCas9 | NRCH | CGCA |
| 9_030_+_160685565_spCas9 | 71: C > T | CBE | | | |
| CBE_NNNRRT_21nt_3- | chr6: 1606855 | saCas9 KKH | saCas9 | NNNRRT | CACAGT |
| 12_015_+_160685566_saCas9 | 71: C > T | CBE | | | |
| CBE_NRCH_20nt_3- | chr6: 1606855 | spCas9 NRCH | spCas9 | NRCH | CACA |
| 9_030_+_160685567_spCas9 | 71: C > T | CBE | | | |
| CBE_NGG_20nt_3- | chr6: 1606855 | SpCas9 IBE | SpCas9 | NGG | CGG |
| 16_033_+_160685558_SpCas9 | 71: C > T | CBE | | | |
| CBE_NGC_20nt_4-9_009_- | chr6: 1606854 | spCas9 NGC | spCas9 | NGC | TGC |
| 160685456_spCas9 | 76: G > A | CBE | | | |
| CBE_NG_20nt_4-9_028_- | chr6: 1606854 | spCas9 NG | spCas9 | NG | TG |
| 160685457_spCas9 | 76: G > A | CBE | | | |
| CBE_NRCH_20nt_3-9_030_- | chr6: 1606854 | spCas9 NRCH | spCas9 | NRCH | TACT |
| 160685458_spCas9 | 76: G > A | CBE | | | |
| CBE_NGA_20nt_3-16_035_- | chr6: 1606854 | spCas9 IBE | spCas9 | NGA | CGA |
| 160685463_spCas9 | 76: G > A | extended CBE | | | |
| CBE_NGA_20nt_4- | chr6: 1606010 | spCas9 VRQR | spCas9 | NGA | TGA |
| 9_006_+_160601067_spCas9 | 75: C > T | CBE | | | |
| CBE_NG_20nt_4- | chr6: 1606010 | spCas9 NG | spCas9 | NG | TG |
| 9_028_+_160601067_spCas9 | 75: C > T | CBE | | | |
| CBE_NGA_20nt_3- | chr6: 1606010 | spCas9 IBE | spCas9 | NGA | TGA |
| 16_035_+_160601067_spCas9 | 75: C > T | extended CBE | | | |
| CBE_NNNRRT_21nt_3- | chr6: 1606010 | saCas9 KKH | saCas9 | NNNRRT | CTTGAT |
| 12_015_+_160601064_saCas9 | 75: C > T | CBE | | | |
| ABE_NGG_20nt_3- | chr6: 1605994 | spCas9 ABE | spCas9 | NGG | GGG |
| 9_002_+_160599485_spCas9 | 94: A > G | | | | |
| ABE_NG_20nt_3- | chr6: 1605994 | spCas9 NG | spCas9 | NG | GG |
| 9_027_+_160599485_spCas9 | 94: A > G | ABE | | | |
| ABE_NGG_20nt_3- | chr6: 1605994 | spCas9 IBE | spCas9 | NGG | GGG |
| 12_018_+_160599485_spCas9 | 94: A > G | | | | |
| ABE_NNGRRT_21nt_5- | chr6: 1605994 | saCas9 ABE | saCas9 | NNGRRT | TTGGGT |
| 14_011_+_160599482_saCas9 | 94: A > G | | | | |
| ABE_NNNRRT_21nt_5- | chr6: 1605994 | saCas9 KKH | saCas9 | NNNRRT | GGTAGT |
| 14_014_+_160599485_saCas9 | 94: A > G | ABE | | | |
| ABE_NG_20nt_3- | chr6: 1605994 | spCas9 NG | spCas9 | NG | GG |
| 9_027_+_160599486_spCas9 | 94: A > G | ABE | | | |
| ABE_NG_20nt_3- | chr6: 1605994 | spCas9 NG | spCas9 | NG | AG |
| 9_027_+_160599489_spCas9 | 94: A > G | ABE | | | |
| ABE_NGG_20nt_3- | chr6: 1605994 | spCas9 IBE | spCas9 | NGG | TGG |
| 12_018_+_160599484_spCas9 | 94: A > G | | | | |
| ABE_NGC_20nt_3- | chr6: 1605910 | spCas9 NGC | spCas9 | NGC | AGC |
| 9_008_+_160591044_spCas9 | 49: A > G | ABE | | | |
| ABE_NG_20nt_3- | chr6: 1605910 | spCas9 NG | spCas9 | NG | AG |
| 9_027_+_160591044_spCas9 | 49: A > G | ABE | | | |
| ABE_NGC_20nt_3- | chr6: 1605910 | spCas9 NGC | spCas9 | NGC | AGC |
| 12_020_+_160591044_spCas9 | 49: A > G | IBE | | | |
| ABE_NRCH_20nt_3- | chr6: 1605910 | spCas9 NRCH | spCas9 | NRCH | AGCA |
| 9_024_+_160591044_spCas9 | 49: A > G | ABE | | | |
| ABE_NGA_20nt_13- | chr6: 1605910 | SpCas9 IBE | SpCas9 | NGA | GGA |
| 16_034_+_160591033_SpCas9 | 49: A > G | expanded ABE | | | |
| CBE_NGA_20nt_4-9_006_- | chr6: 1605485 | spCas9 VRQR | spCas9 | NGA | GGA |
| 160548537_spCas9 | 52: G > A | CBE | | | |
| CBE_NG_20nt_4-9_028_- | chr6: 1605485 | spCas9 NG | spCas9 | NG | GG |
| 160548538_spCas9 | 52: G > A | CBE | | | |
| CBE_NGA_20nt_3-16_035_- | chr6: 1605485 | spCas9 IBE | spCas9 | NGA | GGA |
| 160548537_spCas9 | 52: G > A | extended CBE | | | |
| CBE_NNNRRT_21nt_3- | chr6: 1605485 | saCas9 KKH | saCas9 | NNNRRT | TGTGGT |
| 12_015_−_160548530_saCas9 | 52: G > A | CBE | | | |
| CBE_NG_20nt_4-9_028_- | chr6: 1605485 | spCas9 NG | spCas9 | NG | TG |
| 160548534_spCas9 | 52: G > A | CBE | | | |
| CBE_NRCH_20nt_3-9_030_- | chr6: 1605485 | spCas9 NRCH | spCas9 | NRCH | GACT |
| 160548535_spCas9 | 52: G > A | CBE | | | |
| CBE_NGG_20nt_3-16_033_- | chr6: 1605485 | SpCas9 IBE | SpCas9 | NGG | AGG |
| 160548539_SpCas9 | 52: G > A | CBE | | | |
| CBE_NGG_20nt_3-16_033_- | chr6: 1605485 | SpCas9 IBE | SpCas9 | NGG | GGG |
| 160548538_SpCas9 | 52: G > A | CBE | | | |
| CBE_NGG_20nt_3-16_033_- | chr6: 1605485 | SpCas9 IBE | SpCas9 | NGG | TGG |
| 160548531_SpCas9 | 52: G > A | CBE | | | |
| CBE_NGA_20nt_3-16_035_- | chr6: 1605485 | spCas9 IBE | spCas9 | NGA | AGA |
| 160548542_spCas9 | 52: G > A | extended CBE | | | |
| ABE_NGA_20nt_3- | chr6: 1605326 | spCas9 VRQR | spCas9 | NGA | TGA |
| 9_005_+_160532605_spCas9 | 10: A > G | ABE | | | |
| ABE_NG_20nt_3- | chr6: 1605326 | spCas9 NG | spCas9 | NG | TG |
| 9_027_+_160532605_spCas9 | 10: A > G | ABE | | | |
| ABE_NGA_20nt_3- | chr6: 1605326 | spCas9 VRQR | spCas9 | NGA | TGA |
| 12_019_+_160532605_spCas9 | 10: A > G | IBE | | | |
| ABE_NGA_20nt_3- | chr6: 1605326 | spCas9 VRQR | spCas9 | NGA | AGA |
| 9_005_+_160532607_spCas9 | 10: A > G | ABE | | | |
| ABE_NG_20nt_3- | chr6: 1605326 | spCas9 NG | spCas9 | NG | AG |
| 9_027_+_160532607_spCas9 | 10: A > G | ABE | | | |
| ABE_NGA_20nt_3- | chr6: 1605326 | spCas9 VRQR | spCas9 | NGA | AGA |
| 12_019_+_160532607_spCas9 | 10: A > G | IBE | | | |
| ABE_NGG_20nt_13- | chr6: 1605326 | SpCas9 | SpCas9 | NGG | TGG |
| 16_032_+_160532595_SpCas9 | 10: A > G | IBE_expanded | | | |
| | | ABE | | | |
| ABE_NGG_20nt_13- | chr6: 1605326 | SpCas9 | SpCas9 | NGG | GGG |
| 16_032_+_160532596_SpCas9 | 10: A > G | IBE_expanded | | | |
| | | ABE | | | |
| CBE_NGC_20nt_4- | chr6: 1605325 | spCas9 NGC | spCas9 | NGC | TGC |
| 9_009_+_160532524_spCas9 | 31: C > T | CBE | | | |
| CBE_NG_20nt_4- | chr6: 1605325 | spCas9 NG | spCas9 | NG | TG |
| 9_028_+_160532524_spCas9 | 31: C > T | CBE | | | |
| CBE_NRCH_20nt_3- | chr6: 1605325 | spCas9 NRCH | spCas9 | NRCH | TGCC |
| 9_030_+_160532524_spCas9 | 31: C > T | CBE | | | |
| CBE_NG_20nt_4- | chr6: 1605325 | spCas9 NG | spCas9 | NG | AG |
| 9_028_+_160532522_spCas9 | 31: C > T | CBE | | | |
| ABE_NGG_20nt_3-9_002_- | chr6: 1605317 | spCas9 ABE | spCas9 | NGG | AGG |
| 160531767_spCas9 | 84: T > C | | | | |
| ABE_NG_20nt_3-9_027_- | chr6: 1605317 | spCas9 NG | spCas9 | NG | AG |
| 160531768_spCas9 | 84: T > C | ABE | | | |
| ABE_NGG_20nt_3-12_018_- | chr6: 1605317 | spCas9 IBE | spCas9 | NGG | AGG |
| 160531767_spCas9 | 84: T > C | | | | |
| ABE_NNNRRT_21nt_5- | chr6: 1605317 | saCas9 KKH | saCas9 | NNNRRT | CAAGGT |
| 14_014_−_160531766_saCas9 | 84: T > C | ABE | | | |
| ABE_NG_20nt_3-9_027_- | chr6: 1605317 | spCas9 NG | spCas9 | NG | GG |
| 160531767_spCas9 | 84: T > C | ABE | | | |
| | | | Target | | |
| | | | Nucleo- | | |
| | | | tide | | |
| | | | Posi- | | |
| | | | tion | Location of | |
| | | | in | target site | |
| | Target | | Target | on Chr6 | |
| | Sequence | SEQ | Sequence | (hg38.2bit | |
| | Including | ID | (from 5' | genome sequence) | |
| Guide Name | PAM | NO | end) | start | end |
| CBE_NGA_20nt_4- | CACTGGCATCA | 888 | 7 | 160577150 | 160577173 |
| 9_006_- | GAGGACCCCAG | | | | |
| 160577150_spCas9 | A | | | | |
| CBE_NG_20nt_4- | CACTGGCATCA | 889 | 7 | 160577151 | 160577173 |
| 9_028_- | GAGGACCCCAG | | | | |
| 160577151_spCas9 | | | | | |
| CBE_NGA_20nt_3- | CACTGGCATCA | 890 | 7 | 160577150 | 160577173 |
| 16_035_- | GAGGACCCCAG | | | | |
| 160577150_spCas9 | A | | | | |
| CBE_NRCH_20nt_3 | GGCATCAGAGG | 891 | 3 | 160577145 | 160577169 |
| -9_030_- | ACCCCAGAAAA | | | | |
| 160577145_spCas9 | CT | | | | |
| CBE_NGG_20nt_3- | TGATACCACAC | 892 | 15 | 160577158 | 160577181 |
| 16_033_- | TGGCATCAGAG | | | | |
| 160577158_SpCas9 | G | | | | |
| CBE_NGA_20nt_3- | GATACCACACT | 893 | 14 | 160577157 | 160577180 |
| 16_035_- | GGCATCAGAGG | | | | |
| 160577157_spCas9 | A | | | | |
| CBE_NGA_20nt_4- | GGGCTTTTCTC | 894 | 4 | 160577276 | 160577299 |
| 9_006_+_16057727 | AGGTGGTGCTG | | | | |
| 6_spCas9 | A | | | | |
| CBE_NG_20nt_4- | GGGCTTTTCTC | 895 | 4 | 160577276 | 160577298 |
| 9_028_+_16057727 | AGGTGGTGCTG | | | | |
| 6_spCas9 | | | | | |
| CBE_NGA_20nt_3- | GGGCTTTTCTC | 896 | 4 | 160577276 | 160577299 |
| 16_035_+_1605772 | AGGTGGTGCTG | | | | |
| 76_spCas9 | A | | | | |
| CBE_NGC_20nt_4- | ACAGGGCTTTT | 897 | 7 | 160577273 | 160577296 |
| 9_009_+_16057727 | CTCAGGTGGTG | | | | |
| 3_spCas9 | C | | | | |
| CBE_NG_20nt_4- | ACAGGGCTTTT | 898 | 7 | 160577273 | 160577295 |
| 9_028_+_16057727 | CTCAGGTGGTG | | | | |
| 3_spCas9 | | | | | |
| CBE_NRCH_20nt_3 | ACAGGGCTTTT | 899 | 7 | 160577273 | 160577297 |
| - | CTCAGGTGGTG | | | | |
| 9_030_+_16057727 | CT | | | | |
| 3_spCas9 | | | | | |
| CBE_NNNRRT_21n | AGGGCTTTTCT | 900 | 5 | 160577275 | 160577302 |
| t_3- | CAGGTGGTGCT | | | | |
| 12_015_+_1605772 | GAAAT | | | | |
| 75_saCas9 | | | | | |
| CBE_NG_20nt_4- | CCACAGGGCTT | 901 | 9 | 160577271 | 160577293 |
| 9_028_+_16057727 | TTCTCAGGTGG | | | | |
| 1_spCas9 | | | | | |
| CBE_NGG_20nt_3- | TGGACCACAGG | 902 | 13 | 160577267 | 160577290 |
| 16_033_+_1605772 | GCTTTTCTCAG | | | | |
| 67_SpCas9 | G | | | | |
| CBE_NGG_20nt_3- | ACCACAGGGCT | 903 | 10 | 160577270 | 160577293 |
| 16_033_+_1605772 | TTTCTCAGGTG | | | | |
| 70_SpCas9 | G | | | | |
| ABE_NGA_20nt_3- | CACTGGCATCA | 904 | 8 | 160589567 | 160589590 |
| 9_005_- | GAGAACCACAG | | | | |
| 160589567_spCas9 | A | | | | |
| ABE_NG_20nt_3- | CACTGGCATCA | 905 | 8 | 160589568 | 160589590 |
| 9_027_- | GAGAACCACAG | | | | |
| 160589568_spCas9 | | | | | |
| ABE_NGA_20nt_3- | CACTGGCATCA | 906 | 8 | 160589567 | 160589590 |
| 12_019_- | GAGAACCACAG | | | | |
| 160589567_spCas9 | A | | | | |
| ABE_NNGRRT_21 | CACACTGGCAT | 907 | 10 | 160589565 | 160589592 |
| nt_5-14_011_- | CAGAGAACCAC | | | | |
| 160589565_saCas9 | AGAAT | | | | |
| ABE_NRCH_20nt_3 | GGCATCAGAGA | 908 | 4 | 160589562 | 160589586 |
| -9_024 | ACCACAGAATA | | | | |
| 160589562_spCas9 | CT | | | | |
| ABE_NGA_20nt_13 | TGACACCACAC | 909 | 16 | 160589575 | 160589598 |
| -16_034_- | TGGCATCAGAG | | | | |
| 160589575_SpCas9 | A | | | | |
| CBE_NGA_20nt_4- | TACTGCCGTAA | 910 | 7 | 160545510 | 160545533 |
| 9_006_- | CCCTGATGGTG | | | | |
| 160545510_spCas9 | A | | | | |
| CBE_NG_20nt_4- | TACTGCCGTAA | 911 | 7 | 160545511 | 160545533 |
| 9_028_- | CCCTGATGGTG | | | | |
| 160545511_spCas9 | | | | | |
| CBE_NGA_20nt_3- | TACTGCCGTAA | 912 | 7 | 160545510 | 160545533 |
| 16_035_- | CCCTGATGGTG | | | | |
| 160545510_spCas9 | A | | | | |
| CBE_NNNRRT_21n | TGCCGTAACCC | 913 | 4 | 160545503 | 160545530 |
| t_3-12_015_- | TGATGGTGACA | | | | |
| 160545503_saCas9 | TCAAT | | | | |
| CBE_NG_20nt_4- | AGTACTGCCGT | 914 | 9 | 160545513 | 160545535 |
| 9_028_- | AACCCTGATGG | | | | |
| 160545513_spCas9 | | | | | |
| CBE_NRCH_20nt_3 | ACTGCCGTAAC | 915 | 6 | 160545508 | 160545532 |
| -9_030_- | CCTGATGGTGA | | | | |
| 160545508_spCas9 | CA | | | | |
| CBE_NGG_20nt_3- | CAGTACTGCCG | 916 | 10 | 160545513 | 160545536 |
| 16_033_- | TAACCCTGATG | | | | |
| 160545513_SpCas9 | G | | | | |
| CBE_NGA_20nt_3- | TTTCAGTACTG | 917 | 13 | 160545516 | 160545539 |
| 16_035_- | CCGTAACCCTG | | | | |
| 160545516_spCas9 | A | | | | |
| CBE_NGG_20nt_4- | GGCTCCTTCCG | 918 | 6 | 160635116 | 160635139 |
| 9_003_- | AACAAGGTAAG | | | | |
| 160635116_spCas9 | G | | | | |
| CBE_NG_20nt_4- | GGCTCCTTCCG | 919 | 6 | 160635117 | 160635139 |
| 9_028_- | AACAAGGTAAG | | | | |
| 160635117_spCas9 | | | | | |
| CBE_NGG_20nt_3- | GGCTCCTTCCG | 920 | 6 | 160635116 | 160635139 |
| 16_033_- | AACAAGGTAAG | | | | |
| 160635116_SpCas9 | G | | | | |
| CBE_NGG_20nt_4- | GGCTCCTTCCG | 921 | 5 | 160635116 | 160635139 |
| 9_003_- | AACAAGGTAAG | | | | |
| 160635116_spCas9 | G | | | | |
| CBE_NG_20nt_4- | GGCTCCTTCCG | 922 | 5 | 160635117 | 160635139 |
| 9_028_- | AACAAGGTAAG | | | | |
| 160635117_spCas9 | | | | | |
| CBE_NGG_20nt_3- | GGCTCCTTCCG | 923 | 5 | 160635116 | 160635139 |
| 16_033_- | AACAAGGTAAG | | | | |
| 160635116_SpCas9 | G | | | | |
| CBE_NGA_20nt_4- | GCTCCTTCCGA | 924 | 5 | 160635115 | 160635138 |
| 9_006_- | ACAAGGTAAGG | | | | |
| 160635115_spCas9 | A | | | | |
| CBE_NG_20nt_4- | GCTCCTTCCGA | 925 | 5 | 160635116 | 160635138 |
| 9_028_- | ACAAGGTAAGG | | | | |
| 160635116_spCas9 | | | | | |
| CBE_NGA_20nt_3- | GCTCCTTCCGA | 926 | 5 | 160635115 | 160635138 |
| 16_035_- | ACAAGGTAAGG | | | | |
| 160635115_spCas9 | A | | | | |
| CBE_NGA_20nt_4- | GCTCCTTCCGA | 927 | 4 | 160635115 | 160635138 |
| 9_006_- | ACAAGGTAAGG | | | | |
| 160635115_spCas9 | A | | | | |
| CBE_NG_20nt_4- | GCTCCTTCCGA | 928 | 4 | 160635116 | 160635138 |
| 9_028_- | ACAAGGTAAGG | | | | |
| 160635116_spCas9 | | | | | |
| CBE_NGA_20nt_3- | GCTCCTTCCGA | 929 | 4 | 160635115 | 160635138 |
| 16_035_- | ACAAGGTAAGG | | | | |
| 160635115_spCas9 | A | | | | |
| CBE_NNGRRT_21nt | AGGCTCCTTCC | 930 | 7 | 160635113 | 160635140 |
| _3-12_012_- | GAACAAGGTAA | | | | |
| 160635113_saCas9 | GGAGT | | | | |
| CBE_NNGRRT_21nt | AGGCTCCTTCC | 931 | 6 | 160635113 | 160635140 |
| _3-12_012_- | GAACAAGGTAA | | | | |
| 160635113_saCas9 | GGAGT | | | | |
| CBE_NGG_20nt_3- | CTAGAGGCTCC | 932 | 11 | 160635121 | 160635144 |
| 16_033_- | TTCCGAACAAG | | | | |
| 160635121_SpCas9 | G | | | | |
| CBE_NGG_20nt_3- | CTAGAGGCTCC | 933 | 10 | 160635121 | 160635144 |
| 16_033_- | TTCCGAACAAG | | | | |
| 160635121_SpCas9 | G | | | | |
| CBE_NG_20nt_4- | TAGAGGCTCCT | 934 | 9 | 160635121 | 160635143 |
| 9_028_- | TCCGAACAAGG | | | | |
| 160635121_spCas9 | | | | | |
| CBE_NGA_20nt_3- | CCAAGCCTAGA | 935 | 16 | 160635127 | 160635150 |
| 16_035_- | GGCTCCTTCCG | | | | |
| 160635127_spCas9 | A | | | | |
| CBE_NGG_20nt_4- | TCCACGGCTGT | 936 | 5 | 160590942 | 160590965 |
| 9_003_- | TTCTGAACAAG | | | | |
| 160590942_spCas9 | G | | | | |
| CBE_NG_20nt_4- | TCCACGGCTGT | 937 | 5 | 160590943 | 160590965 |
| 9_028_- | TTCTGAACAAG | | | | |
| 160590943_spCas9 | | | | | |
| CBE_NGG_20nt_3- | TCCACGGCTGT | 938 | 5 | 160590942 | 160590965 |
| 16_033_- | TTCTGAACAAG | | | | |
| 160590942_SpCas9 | G | | | | |
| CBE_NNNRRT_21n | ACGTCCACGGC | 939 | 8 | 160590941 | 160590968 |
| t_3-12_015_- | TGTTTCTGAAC | | | | |
| 160590941_saCas9 | AAGGT | | | | |
| CBE_NG_20nt_4- | CCACGGCTGTT | 940 | 4 | 160590942 | 160590964 |
| 9_028_- | TCTGAACAAGG | | | | |
| 160590942_spCas9 | | | | | |
| CBE_NRCH_20nt_3 | GACGTCCACGG | 941 | 9 | 160590945 | 160590969 |
| -9_030_- | CTGTTTCTGAA | | | | |
| 160590945_spCas9 | CA | | | | |
| CBE_NGA_20nt_3- | GCGACGTCCAC | 942 | 11 | 160590948 | 160590971 |
| 16_035_- | GGCTGTTTCTG | | | | |
| 160590948_spCas9 | A | | | | |
| ABE_NGG_20nt_3- | TACTCATTTGG | 943 | 6 | 160556021 | 160556044 |
| 9_002_+_16055602 | GTAGTTTTCTG | | | | |
| 1_spCas9 | G | | | | |
| ABE_NG_20nt_3- | TACTCATTTGG | 944 | 6 | 160556021 | 160556043 |
| 9_027_+_16055602 | GTAGTTTTCTG | | | | |
| 1_spCas9 | | | | | |
| ABE_NGG_20nt_3- | TACTCATTTGG | 945 | 6 | 160556021 | 160556044 |
| 12_018_+_1605560 | GTAGTTTTCTG | | | | |
| 21_spCas9 | G | | | | |
| ABE_NGG_20nt_3- | ACTCATTTGGG | 946 | 5 | 160556022 | 160556045 |
| 9_002_+_16055602 | TAGTTTTCTGG | | | | |
| 2_spCas9 | G | | | | |
| ABE_NG_20nt_3- | ACTCATTTGGG | 947 | 5 | 160556022 | 160556044 |
| 9_027_+_16055602 | TAGTTTTCTGG | | | | |
| 2_spCas9 | | | | | |
| ABE_NGG_20nt_3- | ACTCATTTGGG | 948 | 5 | 160556022 | 160556045 |
| 12_018_+_1605560 | TAGTTTTCTGG | | | | |
| 22_spCas9 | G | | | | |
| ABE_NGG_20nt_3- | CTCATTTGGGT | 949 | 4 | 160556023 | 160556046 |
| 9_002_+_16055602 | AGTTTTCTGGG | | | | |
| 3_spCas9 | G | | | | |
| ABE_NG_20nt_3- | CTCATTTGGGT | 950 | 4 | 160556023 | 160556045 |
| 9_027_+_16055602 | AGTTTTCTGGG | | | | |
| 3_spCas9 | | | | | |
| ABE_NGG_20nt_3- | CTCATTTGGGT | 951 | 4 | 160556023 | 160556046 |
| 12_018_+_1605560 | AGTTTTCTGGG | | | | |
| 23_spCas9 | G | | | | |
| ABE_NNGRRT_21 | ATACTCATTTG | 952 | 7 | 160556020 | 160556047 |
| nt_5- | GGTAGTTTTCT | | | | |
| 14_011_+_1605560 | GGGGT | | | | |
| 20_saCas9 | | | | | |
| ABE_NG_20nt_3- | TCATTTGGGTA | 953 | 3 | 160556024 | 160556046 |
| 9_027_+_16055602 | GTTTTCTGGGG | | | | |
| 4_spCas9 | | | | | |
| ABE_NGC_20nt_3- | AGTAACAGTGG | 954 | 5 | 160547881 | 160547904 |
| 9_008_+_16054788 | TTGCCTTCTTG | | | | |
| 1_spCas9 | C | | | | |
| ABE_NG_20nt_3- | AGTAACAGTGG | 955 | 5 | 160547881 | 160547903 |
| 9_027_+_16054788 | TTGCCTTCTTG | | | | |
| 1_spCas9 | | | | | |
| ABE_NGC_20nt_3- | AGTAACAGTGG | 956 | 5 | 160547881 | 160547904 |
| 12_020_+_1605478 | TTGCCTTCTTG | | | | |
| 81_spCas9 | C | | | | |
| ABE_NRCH_20nt_3 | AGTAACAGTGG | 957 | 5 | 160547881 | 160547905 |
| - | TTGCCTTCTTG | | | | |
| 9_024_+_16054788 | CC | | | | |
| 1_spCas9 | | | | | |
| CBE_NGG_20nt_4- | CTGCGTCTGAG | 958 | 4 | 160635188 | 160635211 |
| 9_003_+_16063518 | CATTGCGTCAG | | | | |
| 8_spCas9 | G | | | | |
| CBE_NG_20nt_4- | CTGCGTCTGAG | 959 | 4 | 160635188 | 160635210 |
| 9_028_+_16063518 | CATTGCGTCAG | | | | |
| 8_spCas9 | | | | | |
| CBE_NGG_20nt_3- | CTGCGTCTGAG | 960 | 4 | 160635188 | 160635211 |
| 16_033_+_1606351 | CATTGCGTCAG | | | | |
| 88_SpCas9 | G | | | | |
| CBE_NNNRRT_21n | CTTCTGCGTCT | 961 | 7 | 160635185 | 160635212 |
| t_3- | GAGCATTGCGT | | | | |
| 12_015_+_1606351 | CAGGT | | | | |
| 85_saCas9 | | | | | |
| CBE_NG_20nt_4- | CCTTCTGCGTC | 962 | 8 | 160635184 | 160635206 |
| 9_028_+_16063518 | TGAGCATTGCG | | | | |
| 4_spCas9 | | | | | |
| CBE_NNNRRT_21n | ATGTGCCTCGG | 963 | 9 | 160599590 | 160599617 |
| t_3- | TAACTCTGTCC | | | | |
| 12_015_+_1605995 | ATAAT | | | | |
| 90_saCas9 | | | | | |
| CBE_NNNRRT_21n | TGCCTCGGTAA | 964 | 6 | 160599593 | 160599620 |
| t_3- | CTCTGTCCATA | | | | |
| 12_015_+_1605995 | ATGGT | | | | |
| 93_saCas9 | | | | | |
| CBE_NNNRRT_ | CTCGGTAACTC | 965 | 3 | 160599596 | 160599623 |
| 21nt_3- | TGTCCATAATG | | | | |
| 12_015_+_1605995 | GTAGT | | | | |
| 96_saCas9 | | | | | |
| CBE_NGG_20nt_3- | CTCGGTAACTC | 966 | 3 | 160599596 | 160599619 |
| 16_033_+_1605995 | TGTCCATAATG | | | | |
| 96_SpCas9 | G | | | | |
| ABE_NGG_20nt_3- | GGTAATGGCCA | 967 | 11 | 160556120 | 160556143 |
| 12_018_- | GAGTTATCGAG | | | | |
| 160556120_spCas9 | G | | | | |
| ABE_NGC_20nt_3- | GTAATGGCCAG | 968 | 10 | 160556119 | 160556142 |
| 12_020_- | AGTTATCGAGG | | | | |
| 160556119_spCas9 | C | | | | |
| ABE_NRCH_20nt_3 | AATGGCCAGAG | 969 | 8 | 160556116 | 160556140 |
| -9_024_- | TTATCGAGGCA | | | | |
| 160556116_spCas9 | CA | | | | |
| ABE_NGA_20nt_13 | ATGGTAATGGC | 970 | 13 | 160556122 | 160556145 |
| -16_034_- | CAGAGTTATCG | | | | |
| 160556122_SpCas9 | A | | | | |
| CBE_NGG_20nt_4- | CGTCCCTCCGA | 971 | 9 | 160600946 | 160600969 |
| 9_003_- | ATGTTATTCTG | | | | |
| 160600946_spCas9 | G | | | | |
| CBE_NG_20nt_4- | CGTCCCTCCGA | 972 | 9 | 160600947 | 160600969 |
| 9_028_- | ATGTTATTCTG | | | | |
| 160600947_spCas9 | | | | | |
| CBE_NGG_20nt_3- | CGTCCCTCCGA | 973 | 9 | 160600946 | 160600969 |
| 16_033_- | ATGTTATTCTG | | | | |
| 160600946_SpCas9 | G | | | | |
| CBE_NGC_20nt_4- | GTCCCTCCGAA | 974 | 8 | 160600945 | 160600968 |
| 9_009_- | TGTTATTCTGG | | | | |
| 160600945_spCas9 | C | | | | |
| CBE_NG_20nt_4- | GTCCCTCCGAA | 975 | 8 | 160600946 | 160600968 |
| 9_028_- | TGTTATTCTGG | | | | |
| 160600946_spCas9 | | | | | |
| CBE_NRCH_20nt_3 | GTCCCTCCGAA | 976 | 8 | 160600944 | 160600968 |
| -9_030_- | TGTTATTCTGG | | | | |
| 160600944_spCas9 | CT | | | | |
| ABE_NGC_20nt_3- | GTGATGGACAG | 977 | 12 | 160585140 | 160585163 |
| 12_020_- | AGTTATCGAGG | | | | |
| 160585140_spCas9 | C | | | | |
| ABE_NRCH_20nt_3 | TGGACAGAGTT | 978 | 8 | 160585135 | 160585159 |
| -9_024_- | ATCGAGGCACA | | | | |
| 160585135_spCas9 | CT | | | | |
| ABE_NGG_20nt_13 | GGTGATGGACA | 979 | 13 | 160585141 | 160585164 |
| -16_032_- | GAGTTATCGAG | | | | |
| 160585141_SpCas9 | G | | | | |
| ABE_NGA_20nt_13 | GAGGTGATGGA | 980 | 15 | 160585143 | 160585166 |
| -16_034_- | CAGAGTTATCG | | | | |
| 160585143_SpCas9 | A | | | | |
| ABE_NGG_20nt_3- | ACACACTTTCT | 981 | 3 | 160664225 | 160664248 |
| 9_002_- | GGGCACTGCTG | | | | |
| 160664225_spCas9 | G | | | | |
| ABE_NG_20nt_3- | ACACACTTTCT | 982 | 3 | 160664226 | 160664248 |
| 9_027_- | GGGCACTGCTG | | | | |
| 160664226_spCas9 | | | | | |
| ABE_NGG_20nt_3- | ACACACTTTCT | 983 | 3 | 160664225 | 160664248 |
| 12_018_- | GGGCACTGCTG | | | | |
| 160664225_spCas9 | G | | | | |
| ABE_NGC_20nt_3- | GGGACACACTT | 984 | 6 | 160664228 | 160664251 |
| 9_008_- | TCTGGGCACTG | | | | |
| 160664228_spCas9 | C | | | | |
| ABE_NG_20nt_3- | GGGACACACTT | 985 | 6 | 160664229 | 160664251 |
| 9_027_- | TCTGGGCACTG | | | | |
| 160664229_spCas9 | | | | | |
| ABE_NGC_20nt_3- | GGGACACACTT | 986 | 6 | 160664228 | 160664251 |
| 12_020_- | TCTGGGCACTG | | | | |
| 160664228_spCas9 | C | | | | |
| ABE_NRCH_20nt_3 | GGGACACACTT | 987 | 6 | 160664227 | 160664251 |
| -9_024_- | TCTGGGCACTG | | | | |
| 160664227_spCas9 | CT | | | | |
| ABE_NGG_20nt_3- | GGGATTGGGAC | 988 | 12 | 160664234 | 160664257 |
| 12_018 | ACACTTTCTGG | | | | |
| 160664234_spCas9 | G | | | | |
| ABE_NGC_20nt_3- | GGATTGGGACA | 989 | 11 | 160664233 | 160664256 |
| 12_020_- | CACTTTCTGGG | | | | |
| 160664233_spCas9 | C | | | | |
| ABE_NRCH_20nt_3 | ATTGGGACACA | 990 | 9 | 160664230 | 160664254 |
| -9_024_- | CTTTCTGGGCA | | | | |
| 160664230_spCas9 | CT | | | | |
| ABE_NGG_20nt_13 | TGGGATTGGGA | 991 | 13 | 160664235 | 160664258 |
| -16_032_- | CACACTTTCTG | | | | |
| 160664235_SpCas9 | G | | | | |
| CBE_NGG_20nt_4- | ATGCCTCGCCC | 992 | 9 | 160685562 | 160685585 |
| 9_003_+_16068556 | TGCTTCGGCTG | | | | |
| 2_spCas9 | G | | | | |
| CBE_NG_20nt_4- | ATGCCTCGCCC | 993 | 9 | 160685562 | 160685584 |
| 9_028_+_16068556 | TGCTTCGGCTG | | | | |
| 2_spCas9 | | | | | |
| CBE_NGG_20nt_3- | ATGCCTCGCCC | 994 | 9 | 160685562 | 160685585 |
| 16_033_+_1606855 | TGCTTCGGCTG | | | | |
| 62_SpCas9 | G | | | | |
| CBE_NGC_20nt_4- | TGCCTCGCCCT | 995 | 8 | 160685563 | 160685586 |
| 9_009_+_16068556 | GCTTCGGCTGG | | | | |
| 3_spCas9 | C | | | | |
| CBE_NG_20nt_4- | TGCCTCGCCCT | 996 | 8 | 160685563 | 160685585 |
| 9_028_+_16068556 | GCTTCGGCTGG | | | | |
| 3_spCas9 | | | | | |
| CBE_NGC_20nt_4- | CCTCGCCCTGC | 997 | 6 | 160685565 | 160685588 |
| 9_009_+_16068556 | TTCGGCTGGCG | | | | |
| 5_spCas9 | C | | | | |
| CBE_NG_20nt_4- | CCTCGCCCTGC | 998 | 6 | 160685565 | 160685587 |
| 9_028_+_16068556 | TTCGGCTGGCG | | | | |
| 5_spCas9 | | | | | |
| CBE_NRCH_20nt_3 | CCTCGCCCTGC | 999 | 6 | 160685565 | 160685589 |
| 9_030_+_16068556 | TTCGGCTGGCG | | | | |
| 5_spCas9 | CA | | | | |
| CBE_NNNRRT_21n | CTCGCCCTGCT | 1000 | 5 | 160685566 | 160685593 |
| t_3- | TCGGCTGGCGC | | | | |
| 12_015_+_1606855 | ACAGT | | | | |
| 66_saCas9 | | | | | |
| CBE_NRCH_20nt_3 | TCGCCCTGCTT | 1001 | 4 | 160685567 | 160685591 |
| 9_030_+_16068556 | CGGCTGGCGCA | | | | |
| 7_spCas9 | CA | | | | |
| CBE_NGG_20nt_3- | GGCAATGCCTC | 1002 | 13 | 160685558 | 160685581 |
| 16_033_+_1606855 | GCCCTGCTTCG | | | | |
| 58_SpCas9 | G | | | | |
| CBE_NGC_20nt_4- | GGTCACTCCCA | 1003 | 4 | 160685456 | 160685479 |
| 9_009_- | CCCGAATACTG | | | | |
| 160685456_spCas9 | C | | | | |
| CBE_NG_20nt_4- | GGTCACTCCCA | 1004 | 4 | 160685457 | 160685479 |
| 9_028_- | CCCGAATACTG | | | | |
| 160685457_spCas9 | | | | | |
| CBE_NRCH_20nt_3 | TCGGGTCACTC | 1005 | 7 | 160685458 | 160685482 |
| -9_030_- | CCACCCGAATA | | | | |
| 160685458_spCas9 | CT | | | | |
| CBE_NGA_20nt_3- | AAAATCGGGTC | 1006 | 11 | 160685463 | 160685486 |
| 16_035_- | ACTCCCACCCG | | | | |
| 160685463_spCas9 | A | | | | |
| CBE_NGA_20nt_4- | TGGATTTCGGC | 1007 | 8 | 160601067 | 160601090 |
| 9_006_+_16060106 | AGTAGTTCTTG | | | | |
| 7_spCas9 | A | | | | |
| CBE_NG_20nt_4- | TGGATTTCGGC | 1008 | 8 | 160601067 | 160601089 |
| 9_028_+_16060106 | AGTAGTTCTTG | | | | |
| 7_spCas9 | | | | | |
| CBE_NGA_20nt_3- | TGGATTTCGGC | 1009 | 8 | 160601067 | 160601090 |
| 16_035_+_1606010 | AGTAGTTCTTG | | | | |
| 67_spCas9 | A | | | | |
| CBE_NNNRRT_21n | ATCTGGATTTC | 1010 | 11 | 160601064 | 160601091 |
| t_3- | GGCAGTAGTTC | | | | |
| 12_015_+_1606010 | TTGAT | | | | |
| 64_saCas9 | | | | | |
| ABE_NGG_20nt_3- | GAACAAAGACG | 1011 | 9 | 160599485 | 160599508 |
| 9_002_+_16059948 | TACGCATTTGG | | | | |
| 5_spCas9 | G | | | | |
| ABE_NG_20nt_3- | GAACAAAGACG | 1012 | 9 | 160599485 | 160599507 |
| 9_027_+_16059948 | TACGCATTTGG | | | | |
| 5_spCas9 | | | | | |
| ABE_NGG_20nt_3- | GAACAAAGACG | 1013 | 9 | 160599485 | 160599508 |
| 12_018_+_1605994 | TACGCATTTGG | | | | |
| 85_spCas9 | G | | | | |
| ABE_NNGRRT_21 | AAAGAACAAAG | 1014 | 12 | 160599482 | 160599509 |
| nt_5- | ACGTACGCATT | | | | |
| 14_011_+_1605994 | TGGGT | | | | |
| 82_saCas9 | | | | | |
| ABE_NNNRRT_21 | GAACAAAGACG | 1015 | 9 | 160599485 | 160599512 |
| nt_5- | TACGCATTTGG | | | | |
| 14_014_+_1605994 | GTAGT | | | | |
| 85_saCas9 | | | | | |
| ABE_NG_20nt_3- | AACAAAGACGT | 1016 | 8 | 160599486 | 160599508 |
| 9_027_+_16059948 | ACGCATTTGGG | | | | |
| 6_spCas9 | | | | | |
| ABE_NG_20nt_3- | AAAGACGTACG | 1017 | 5 | 160599489 | 160599511 |
| 9_027_+_16059948 | CATTTGGGTAG | | | | |
| 9_spCas9 | | | | | |
| ABE_NGG_20nt_3- | AGAACAAAGAC | 1018 | 10 | 160599484 | 160599507 |
| 12_018_+_1605994 | GTACGCATTTG | | | | |
| 84_spCas9 | G | | | | |
| ABE_NGC_20nt_3- | TAACACCAAGG | 1019 | 5 | 160591044 | 160591067 |
| 9_008_+_16059104 | ACTAATCTCAG | | | | |
| 4_spCas9 | C | | | | |
| ABE_NG_20nt_3- | TAACACCAAGG | 1020 | 5 | 160591044 | 160591066 |
| 9_027_+_16059104 | ACTAATCTCAG | | | | |
| 4_spCas9 | | | | | |
| ABE_NGC_20nt_3- | TAACACCAAGG | 1021 | 5 | 160591044 | 160591067 |
| 12_020_+_1605910 | ACTAATCTCAG | | | | |
| 44_spCas9 | C | | | | |
| ABE_NRCH_20nt_3 | TAACACCAAGG | 1022 | 5 | 160591044 | 160591068 |
| - | ACTAATCTCAG | | | | |
| 9_024_+_16059104 | CA | | | | |
| 4_spCas9 | | | | | |
| ABE_NGA_20nt_13 | GATCCATGGTA | 1023 | 16 | 160591033 | 160591056 |
| 16_034_+_1605910 | TAACACCAAGG | | | | |
| 33_SpCas9 | A | | | | |
| CBE_NGA_20nt_4- | GCGATGCTCAG | 1024 | 9 | 160548537 | 160548560 |
| 9_006_- | ACACAGAAGGG | | | | |
| 160548537_spCas9 | A | | | | |
| CBE_NG_20nt_4- | GCGATGCTCAG | 1025 | 9 | 160548538 | 160548560 |
| 9_028_- | ACACAGAAGGG | | | | |
| 160548538_spCas9 | | | | | |
| CBE_NGA_20nt_3- | GCGATGCTCAG | 1026 | 9 | 160548537 | 160548560 |
| 16_035_- | ACACAGAAGGG | | | | |
| 160548537_spCas9 | A | | | | |
| CBE_NNNRRT_21n | ATGCTCAGACA | 1027 | 6 | 160548530 | 160548557 |
| t_3-12_015_- | CAGAAGGGACT | | | | |
| 160548530_saCas9 | GTGGT | | | | |
| CBE_NG_20nt_4- | TGCTCAGACAC | 1028 | 5 | 160548534 | 160548556 |
| 9_028_- | AGAAGGGACTG | | | | |
| 160548534_spCas9 | | | | | |
| CBE_NRCH_20nt_3 | CGATGCTCAGA | 1029 | 8 | 160548535 | 160548559 |
| -9_030_- | CACAGAAGGGA | | | | |
| 160548535_spCas9 | CT | | | | |
| CBE_NGG_20nt_3- | ACGCGATGCTC | 1030 | 11 | 160548539 | 160548562 |
| 16_033_- | AGACACAGAAG | | | | |
| 160548539_SpCas9 | G | | | | |
| CBE_NGG_20nt_3- | CGCGATGCTCA | 1031 | 10 | 160548538 | 160548561 |
| 16_033_- | GACACAGAAGG | | | | |
| 160548538_SpCas9 | G | | | | |
| CBE_NGG_20nt_3- | CTCAGACACAG | 1032 | 3 | 160548531 | 160548554 |
| 16_033_- | AAGGGACTGTG | | | | |
| 160548531_SpCas9 | G | | | | |
| CBE_NGA_20nt_3- | CTGACGCGATG | 1033 | 14 | 160548542 | 160548565 |
| 16_035_- | CTCAGACACAG | | | | |
| 160548542_spCas9 | A | | | | |
| ABE_NGA_20nt_3- | AACAAGGAGCT | 1034 | 5 | 160532605 | 160532628 |
| 9_005_+_16053260 | GGGCTTCCTTG | | | | |
| 5_spCas9 | A | | | | |
| ABE_NG_20nt_3- | AACAAGGAGCT | 1035 | 5 | 160532605 | 160532627 |
| 9_027_+_16053260 | GGGCTTCCTTG | | | | |
| 5_spCas9 | | | | | |
| ABE_NGA_20nt_3- | AACAAGGAGCT | 1036 | 5 | 160532605 | 160532628 |
| 12_019_+_1605326 | GGGCTTCCTTG | | | | |
| 05_spCas9 | A | | | | |
| ABE_NGA_20nt_3- | CAAGGAGCTGG | 1037 | 3 | 160532607 | 160532630 |
| 9_005_+_16053260 | GCTTCCTTGAG | | | | |
| 7_spCas9 | A | | | | |
| ABE_NG_20nt_3- | CAAGGAGCTGG | 1038 | 3 | 160532607 | 160532629 |
| 9_027_+_16053260 | GCTTCCTTGAG | | | | |
| 7_spCas9 | | | | | |
| ABE_NGA_20nt_3- | CAAGGAGCTGG | 1039 | 3 | 160532607 | 160532630 |
| 12_019_+_1605326 | GCTTCCTTGAG | | | | |
| 07_spCas9 | A | | | | |
| ABE_NGG_20nt_13- | CATTCTCAATA | 1040 | 15 | 160532595 | 160532618 |
| 16_032_+_1605325 | ACAAGGAGCTG | | | | |
| 95_SpCas9 | G | | | | |
| ABE_NGG_20nt_13- | ATTCTCAATAA | 1041 | 14 | 160532596 | 160532619 |
| 16_032_+_1605325 | CAAGGAGCTGG | | | | |
| 96_SpCas9 | G | | | | |
| CBE_NGC_20nt_4- | TCTTACCTGGC | 1042 | 7 | 160532524 | 160532547 |
| 9_009_+_16053252 | AACTGTCAGTG | | | | |
| 4_spCas9 | C | | | | |
| CBE_NG_20nt_4- | TCTTACCTGGC | 1043 | 7 | 160532524 | 160532546 |
| 9_028_+_16053252 | AACTGTCAGTG | | | | |
| 4_spCas9 | | | | | |
| CBE_NRCH_20nt_ | TCTTACCTGGC | 1044 | 7 | 160532524 | 160532548 |
| 3- | AACTGTCAGTG | | | | |
| 9_030_+_16053252 | CC | | | | |
| 4_spCas9 | | | | | |
| CBE_NG_20nt_4- | TTTCTTACCTG | 1045 | 9 | 160532522 | 160532544 |
| 9_028_+_16053252 | GCAACTGTCAG | | | | |
| 2_spCas9 | | | | | |
| ABE_NGG_20nt_3- | GTGTCTATGCT | 1046 | 7 | 160531767 | 160531790 |
| 9_002_- | CGTGTTTCAAG | | | | |
| 160531767_spCas9 | G | | | | |
| ABE_NG_20nt_3- | GTGTCTATGCT | 1047 | 7 | 160531768 | 160531790 |
| 9_027_- | CGTGTTTCAAG | | | | |
| 160531768_spCas9 | | | | | |
| ABE_NGG_20nt_3- | GTGTCTATGCT | 1048 | 7 | 160531767 | 160531790 |
| 12_018_- | CGTGTTTCAAG | | | | |
| 160531767_spCas9 | G | | | | |
| ABE_NNNRRT_21 | CTGGTGTCTAT | 1049 | 10 | 160531766 | 160531793 |
| nt_5-14_014_- | GCTCGTGTTTC | | | | |
| 160531766_saCas9 | AAGGT | | | | |
| ABE_NG_20nt_3- | TGTCTATGCTC | 1050 | 6 | 160531767 | 160531789 |
| 9_027_- | GTGTTTCAAGG | | | | |
| 160531767_spCas9 | | | | | |

| | | SEQ ID |
|---|---|---|
| Guide Name | Spacer sequence | NO |
| CBE_NGA_20nt_ | CACUGGCAUCAGAGGACCCC | 1051 |
| 4-9_006_−_ | | |
| 160577150_spCas9 | | |
| CBE_NG_20nt_ | CACUGGCAUCAGAGGACCCC | 1052 |
| 4-9_028_−_ | | |
| 160577151_spCas9 | | |
| CBE_NGA_20nt_ | CACUGGCAUCAGAGGACCCC | 1053 |
| 3-16_035_−_ | | |
| 160577150_spCas9 | | |
| CBE_NRCH_20nt_ | GGCAUCAGAGGACCCCAGAA | 1054 |
| 3-9_030_−_ | | |
| 160577145_spCas9 | | |
| CBE_NGG_20nt_ | UGAUACCACACUGGCAUCAG | 1055 |
| 3-16_033_−_ | | |
| 160577158_SpCas9 | | |
| CBE_NGA_20nt_ | GAUACCACACUGGCAUCAGA | 1056 |
| 3-16_035_−_ | | |
| 160577157_spCas9 | | |
| CBE_NGA_20nt_ | GGGCUUUUCUCAGGUGGUGC | 1057 |
| 4-9_006_+_ | | |
| 160577276_spCas9 | | |
| CBE_NG_20nt_ | GGGCUUUUCUCAGGUGGUGC | 1058 |
| 4-9_028_+_ | | |
| 160577276_spCas9 | | |
| CBE_NGA_20nt_ | GGGCUUUUCUCAGGUGGUGC | 1059 |
| 3-16_035_+_ | | |
| 160577276_spCas9 | | |
| CBE_NGC_20nt_ | ACAGGGCUUUUCUCAGGUGG | 1060 |
| 4-9_009_+_ | | |
| 160577273_spCas9 | | |
| CBE_NG_20nt_ | ACAGGGCUUUUCUCAGGUGG | 1061 |
| 4-9_028_+_ | | |
| 160577273_spCas9 | | |
| CBE_NRCH_20nt_ | ACAGGGCUUUUCUCAGGUGG | 1062 |
| 3-9_030_+_ | | |
| 160577273_spCas9 | | |
| CBE_NNNRRT_21nt_ | AGGGCUUUUCUCAGGUGGUGC | 1063 |
| 3- | | |
| 12_015_+_ | | |
| 160577275_saCas9 | | |
| CBE_NG_20nt_ | CCACAGGGCUUUUCUCAGGU | 1064 |
| 4-9_028_+_ | | |
| 160577271_spCas9 | | |
| CBE_NGG_20nt_ | UGGACCACAGGGCUUUUCUC | 1065 |
| 3-16_033_+_ | | |
| 160577267_SpCas9 | | |
| CBE_NGG_20nt_ | ACCACAGGGCUUUUCUCAGG | 1066 |
| 3-16_033_+_ | | |
| 160577270_SpCas9 | | |
| ABE_NGA_20nt_ | CACUGGCAUCAGAGAACCAC | 1067 |
| 3-9_005_−_ | | |
| 160589567_spCas9 | | |
| ABE_NG_20nt_ | CACUGGCAUCAGAGAACCAC | 1068 |
| 3-9_027_−_ | | |
| 160589568_spCas9 | | |
| ABE_NGA_20nt_ | CACUGGCAUCAGAGAACCAC | 1069 |
| 3-12_019_−_ | | |
| 160589567_spCas9 | | |
| ABE_NNGRRT_21nt_ | CACACUGGCAUCAGAGAACCA | 1070 |
| 5-14_011_- | | |
| 160589565_saCas9 | | |
| ABE_NRCH_20nt_ | GGCAUCAGAGAACCACAGAA | 1071 |
| 3-9_024_−_ | | |
| 160589562_spCas9 | | |
| ABE_NGA_20nt_ | UGACACCACACUGGCAUCAG | 1072 |
| 13-16_034_−_ | | |
| 160589575_SpCas9 | | |
| CBE_NGA_20nt_ | UACUGCCGUAACCCUGAUGG | 1073 |
| 4-9_006_−_ | | |
| 160545510_spCas9 | | |
| CBE_NG_20nt_ | UACUGCCGUAACCCUGAUGG | 1074 |
| 4-9_028_−_ | | |
| 160545511_spCas9 | | |
| CBE_NGA_20nt_ | UACUGCCGUAACCCUGAUGG | 1075 |
| 3-16_035_−_ | | |
| 160545510_spCas9 | | |
| CBE_NNNRRT_21nt_ | UGCCGUAACCCUGAUGGUGAC | 1076 |
| 3-12_015_- | | |
| 160545503_saCas9 | | |
| CBE_NG_20nt_ | AGUACUGCCGUAACCCUGAU | 1077 |
| 4-9_028_−_ | | |
| 160545513_spCas9 | | |
| CBE_NRCH_20nt_ | ACUGCCGUAACCCUGAUGGU | 1078 |
| 3-9_030_−_ | | |
| 160545508_spCas9 | | |
| CBE_NGG_20nt_ | CAGUACUGCCGUAACCCUGA | 1079 |
| 3-16_033_−_ | | |
| 160545513_SpCas9 | | |
| CBE_NGA_20nt_ | UUUCAGUACUGCCGUAACCC | 1080 |
| 3-16_035_−_ | | |
| 160545516_spCas9 | | |
| CBE_NGG_20nt_ | GGCUCCUUCCGAACAAGGUA | 1081 |
| 4-9_003_−_ | | |
| 160635116_spCas9 | | |
| CBE_NG_20nt_ | GGCUCCUUCCGAACAAGGUA | 1082 |
| 4-9_028_−_ | | |
| 160635117_spCas9 | | |
| CBE_NGG_20nt_ | GGCUCCUUCCGAACAAGGUA | 1083 |
| 3-16_033_−_ | | |
| 160635116_SpCas9 | | |
| CBE_NGG_20nt_ | GGCUCCUUCCGAACAAGGUA | 1084 |
| 4-9_003_−_ | | |
| 160635116_spCas9 | | |
| CBE_NG_20nt_ | GGCUCCUUCCGAACAAGGUA | 1085 |
| 4-9_028_−_ | | |
| 160635117_spCas9 | | |
| CBE_NGG_20nt_ | GGCUCCUUCCGAACAAGGUA | 1086 |
| 3-16_033_−_ | | |
| 160635116_SpCas9 | | |
| CBE_NGA_20nt_ | GCUCCUUCCGAACAAGGUAA | 1087 |
| 4-9_006_−_ | | |
| 160635115_spCas9 | | |
| CBE_NG_20nt_ | GCUCCUUCCGAACAAGGUAA | 1088 |
| 4-9_028_−_ | | |
| 160635116_spCas9 | | |
| CBE_NGA_20nt_ | GCUCCUUCCGAACAAGGUAA | 1089 |
| 3-16_035_−_ | | |
| 160635115_spCas9 | | |
| CBE_NGA_20nt_ | GCUCCUUCCGAACAAGGUAA | 1090 |
| 4-9_006_−_ | | |
| 160635115_spCas9 | | |
| CBE_NG_20nt_ | GCUCCUUCCGAACAAGGUAA | 1091 |
| 4-9_028_−_ | | |
| 160635116_spCas9 | | |
| CBE_NGA_20nt_ | GCUCCUUCCGAACAAGGUAA | 1092 |
| 3-16_035_−_ | | |
| 160635115_spCas9 | | |
| CBE_NNGRRT_21nt_ | AGGCUCCUUCCGAACAAGGUA | 1093 |
| 3-12_012_- | | |
| 160635113_saCas9 | | |
| CBE_NNGRRT_21nt_ | AGGCUCCUUCCGAACAAGGUA | 1094 |
| 3-12_012_- | | |
| 160635113_saCas9 | | |
| CBE_NGG_20nt_ | CUAGAGGCUCCUUCCGAACA | 1095 |
| 3-16_033_−_ | | |
| 160635121_SpCas9 | | |
| CBE_NGG_20nt_ | CUAGAGGCUCCUUCCGAACA | 1096 |
| 3-16_033_−_ | | |
| 160635121_SpCas9 | | |
| CBE_NG_20nt_ | UAGAGGCUCCUUCCGAACAA | 1097 |
| 4-9_028_−_ | | |
| 160635121_spCas9 | | |
| CBE_NGA_20nt_ | CCAAGCCUAGAGGCUCCUUC | 1098 |
| 3-16_035_−_ | | |
| 160635127_spCas9 | | |
| CBE_NGG_20nt_ | UCCACGGCUGUUUCUGAACA | 1099 |
| 4-9_003_−_ | | |
| 160590942_spCas9 | | |
| CBE_NG_20nt_ | UCCACGGCUGUUUCUGAACA | 1100 |
| 4-9_028_−_ | | |
| 160590943_spCas9 | | |
| CBE_NGG_20nt_ | UCCACGGCUGUUUCUGAACA | 1101 |
| 3-16_033_−_ | | |
| 160590942_SpCas9 | | |
| CBE_NNNRRT_21nt_ | ACGUCCACGGCUGUUUCUGAA | 1102 |
| 3-12_015_- | | |
| 160590941_saCas9 | | |
| CBE_NG_20nt_ | CCACGGCUGUUUCUGAACAA | 1103 |
| 4-9_028_−_ | | |
| 160590942_spCas9 | | |
| CBE_NRCH_20nt_ | GACGUCCACGGCUGUUUCUG | 1104 |
| 3-9_030_−_ | | |
| 160590945_spCas9 | | |
| CBE_NGA_20nt_ | GCGACGUCCACGGCUGUUUC | 1105 |
| 3-16_035_−_ | | |
| 160590948_spCas9 | | |
| ABE_NGG_20nt_ | UACUCAUUUGGGUAGUUUUC | 1106 |
| 3-9_002_+_ | | |
| 160556021_spCas9 | | |
| ABE_NG_20nt_ | UACUCAUUUGGGUAGUUUUC | 1107 |
| 3-9_027_+_ | | |
| 160556021_spCas9 | | |
| ABE_NGG_20nt_ | UACUCAUUUGGGUAGUUUUC | 1108 |
| 3-12_018_+_ | | |
| 160556021_spCas9 | | |
| ABE_NGG_20nt_ | ACUCAUUUGGGUAGUUUUCU | 1109 |
| 3-9_002_+_ | | |
| 160556022_spCas9 | | |
| ABE_NG_20nt_ | ACUCAUUUGGGUAGUUUUCU | 1110 |
| 3-9_027_+_ | | |
| 160556022_spCas9 | | |
| ABE_NGG_20nt_ | ACUCAUUUGGGUAGUUUUCU | 1111 |
| 3-12_018_+_ | | |
| 160556022_spCas9 | | |
| ABE_NGG_20nt_ | CUCAUUUGGGUAGUUUUCUG | 1112 |
| 3-9_002_+_ | | |
| 160556023_spCas9 | | |
| ABE_NG_20nt_ | CUCAUUUGGGUAGUUUUCUG | 1113 |
| 3-9_027_+_ | | |
| 160556023_spCas9 | | |
| ABE_NGG_20nt_ | CUCAUUUGGGUAGUUUUCUG | 1114 |
| 3-12_018_+_ | | |
| 160556023_spCas9 | | |
| ABE_NNGRRT_21nt_ | AUACUCAUUUGGGUAGUUUUC | 1115 |
| 5- | | |
| 14_011_+_ | | |
| 160556020_saCas9 | | |
| ABE_NG_20nt_ | UCAUUUGGGUAGUUUUCUGG | 1116 |
| 3-9_027_+_ | | |
| 160556024_spCas9 | | |
| ABE_NGC_20nt_ | AGUAACAGUGGUUGCCUUCU | 1117 |
| 3-9_008_+_ | | |
| 160547881_spCas9 | | |
| ABE_NG_20nt_ | AGUAACAGUGGUUGCCUUCU | 1118 |
| 3-9_027_+_ | | |
| 160547881_spCas9 | | |
| ABE_NGC_20nt_ | AGUAACAGUGGUUGCCUUCU | 1119 |
| 3-12_020_+_ | | |
| 160547881_spCas9 | | |
| ABE_NRCH_20nt_ | AGUAACAGUGGUUGCCUUCU | 1120 |
| 3-9_024_+_ | | |
| 160547881_spCas9 | | |
| CBE_NGG_20nt_ | CUGCGUCUGAGCAUUGCGUC | 1121 |
| 4-9_003_+_ | | |
| 160635188_spCas9 | | |
| CBE_NG_20nt_ | CUGCGUCUGAGCAUUGCGUC | 1122 |
| 4-9_028_+_ | | |
| 160635188_spCas9 | | |
| CBE_NGG_20nt_ | CUGCGUCUGAGCAUUGCGUC | 1123 |
| 3-16_033_+_ | | |
| 160635188_SpCas9 | | |
| CBE_NNNRRT_21nt_ | CUUCUGCGUCUGAGCAUUGCG | 1124 |
| 3- | | |
| 12_015_+_ | | |
| 160635185_saCas9 | | |
| CBE_NG_20nt_ | CCUUCUGCGUCUGAGCAUUG | 1125 |
| 4-9_028_+_ | | |
| 160635184_spCas9 | | |
| CBE_NNNRRT_21nt_ | AUGUGCCUCGGUAACUCUGUC | 1126 |
| 3- | | |
| 12_015_+_ | | |
| 160599590_saCas9 | | |
| CBE_NNNRRT_21nt_ | UGCCUCGGUAACUCUGUCCAU | 1127 |
| 3- | | |
| 12_015_+_ | | |
| 160599593_saCas9 | | |
| CBE_NNNRRT_21nt_ | CUCGGUAACUCUGUCCAUAAU | 1128 |
| 3- | | |
| 12_015_+_ | | |
| 160599596_saCas9 | | |
| CBE_NGG_20nt_ | CUCGGUAACUCUGUCCAUAA | 1129 |
| 3-16_033_+_ | | |
| 160599596_SpCas9 | | |
| ABE_NGG_20nt_ | GGUAAUGGCCAGAGUUAUCG | 1130 |
| 3-12_018_−_ | | |
| 160556120_spCas9 | | |
| ABE_NGC_20nt_ | GUAAUGGCCAGAGUUAUCGA | 1131 |
| 3-12_020_−_ | | |
| 160556119_spCas9 | | |
| ABE_NRCH_20nt_ | AAUGGCCAGAGUUAUCGAGG | 1132 |
| 3-9_024_−_ | | |
| 160556116_spCas9 | | |
| ABE_NGA_20nt_ | AUGGUAAUGGCCAGAGUUAU | 1133 |
| 13-16_034_−_ | | |
| 160556122_SpCas9 | | |
| CBE_NGG_20nt_ | CGUCCCUCCGAAUGUUAUUC | 1134 |
| 4-9_003_−_ | | |
| 160600946_spCas9 | | |
| CBE_NG_20nt_ | CGUCCCUCCGAAUGUUAUUC | 1135 |
| 4-9_028_−_ | | |
| 160600947_spCas9 | | |
| CBE_NGG_20nt_ | CGUCCCUCCGAAUGUUAUUC | 1136 |
| 3-16_033_−_ | | |
| 160600946_SpCas9 | | |
| CBE_NGC_20nt_ | GUCCCUCCGAAUGUUAUUCU | 1137 |
| 4-9_009_−_ | | |
| 160600945_spCas9 | | |
| CBE_NG_20nt_ | GUCCCUCCGAAUGUUAUUCU | 1138 |
| 4-9_028_−_ | | |
| 160600946_spCas9 | | |
| CBE_NRCH_20nt_ | GUCCCUCCGAAUGUUAUUCU | 1139 |
| 3-9_030_−_ | | |
| 160600944_spCas9 | | |
| ABE_NGC_20nt_ | GUGAUGGACAGAGUUAUCGA | 1140 |
| 3-12_020_−_ | | |
| 160585140_spCas9 | | |
| ABE_NRCH_20nt_ | UGGACAGAGUUAUCGAGGCA | 1141 |
| 3-9_024_−_ | | |
| 160585135_spCas9 | | |
| ABE_NGG_20nt_ | GGUGAUGGACAGAGUUAUCG | 1142 |
| 13-16_032_−_ | | |
| 160585141_SpCas9 | | |
| ABE_NGA_20nt_ | GAGGUGAUGGACAGAGUUAU | 1143 |
| 13-16_034_−_ | | |
| 160585143_SpCas9 | | |
| ABE_NGG_20nt_ | ACACACUUUCUGGGCACUGC | 1144 |
| 3-9_002_−_ | | |
| 160664225_spCas9 | | |
| ABE_NG_20nt_ | ACACACUUUCUGGGCACUGC | 1145 |
| 3-9_027_−_ | | |
| 160664226_spCas9 | | |
| ABE_NGG_20nt_ | ACACACUUUCUGGGCACUGC | 1146 |
| 3-12_018_−_ | | |
| 160664225_spCas9 | | |
| ABE_NGC_20nt_ | GGGACACACUUUCUGGGCAC | 1147 |
| 3-9_008_−_ | | |
| 160664228_spCas9 | | |
| ABE_NG_20nt_ | GGGACACACUUUCUGGGCAC | 1148 |
| 3-9_027_−_ | | |
| 160664229_spCas9 | | |
| ABE_NGC_20nt_ | GGGACACACUUUCUGGGCAC | 1149 |
| 3-12_020_−_ | | |
| 160664228_spCas9 | | |
| ABE_NRCH_20nt_ | GGGACACACUUUCUGGGCAC | 1150 |
| 3-9_024_−_ | | |
| 160664227_spCas9 | | |
| ABE_NGG_20nt_ | GGGAUUGGGACACACUUUCU | 1151 |
| 3-12_018_−_ | | |
| 160664234_spCas9 | | |
| ABE_NGC_20nt_ | GGAUUGGGACACACUUUCUG | 1152 |
| 3-12_020_−_ | | |
| 160664233_spCas9 | | |
| ABE_NRCH_20nt_ | AUUGGGACACACUUUCUGGG | 1153 |
| 3-9_024_−_ | | |
| 160664230_spCas9 | | |
| ABE_NGG_20nt_ | UGGGAUUGGGACACACUUUC | 1154 |
| 13-16_032_−_ | | |
| 160664235_SpCas9 | | |
| CBE_NGG_20nt_ | AUGCCUCGCCCUGCUUCGGC | 1155 |
| 4-9_003_+_ | | |
| 160685562_spCas9 | | |
| CBE_NG_20nt_ | AUGCCUCGCCCUGCUUCGGC | 1156 |
| 4-9_028_+_ | | |
| 160685562_spCas9 | | |
| CBE_NGG_20nt_ | AUGCCUCGCCCUGCUUCGGC | 1157 |
| 3-16_033_+_ | | |
| 160685562_SpCas9 | | |
| CBE_NGC_20nt_ | UGCCUCGCCCUGCUUCGGCU | 1158 |
| 4-9_009_+_ | | |
| 160685563_spCas9 | | |
| CBE_NG_20nt_ | UGCCUCGCCCUGCUUCGGCU | 1159 |
| 4-9_028_+_ | | |
| 160685563_spCas9 | | |
| CBE_NGC_20nt_ | CCUCGCCCUGCUUCGGCUGG | 1160 |
| 4-9_009_+_ | | |
| 160685565_spCas9 | | |
| CBE_NG_20nt_ | CCUCGCCCUGCUUCGGCUGG | 1161 |
| 4-9_028_+_ | | |
| 160685565_spCas9 | | |
| CBE_NRCH_20nt_ | CCUCGCCCUGCUUCGGCUGG | 1162 |
| 3-9_030_+_ | | |
| 160685565_spCas9 | | |
| CBE_NNNRRT_21nt_ | CUCGCCCUGCUUCGGCUGGCG | 1163 |
| 3- | | |
| 12_015_+_ | | |
| 160685566_saCas9 | | |
| CBE_NRCH_20nt_ | UCGCCCUGCUUCGGCUGGCG | 1164 |
| 3-9_030_+_ | | |
| 160685567_spCas9 | | |
| CBE_NGG_20nt_ | GGCAAUGCCUCGCCCUGCUU | 1165 |
| 3-16_033_+_ | | |
| 160685558_SpCas9 | | |
| CBE_NGC_20nt_ | GGUCACUCCCACCCGAAUAC | 1166 |
| 4-9_009_−_ | | |
| 160685456_spCas9 | | |
| CBE_NG_20nt_ | GGUCACUCCCACCCGAAUAC | 1167 |
| 4-9_028_−_ | | |
| 160685457_spCas9 | | |
| CBE_NRCH_20nt_ | UCGGGUCACUCCCACCCGAA | 1168 |
| 3-9_030_−_ | | |
| 160685458_spCas9 | | |
| CBE_NGA_20nt_ | AAAAUCGGGUCACUCCCACC | 1169 |
| 3-16_035_−_ | | |
| 160685463_spCas9 | | |
| CBE_NGA_20nt_ | UGGAUUUCGGCAGUAGUUCU | 1170 |
| 4-9_006_+_ | | |
| 160601067_spCas9 | | |
| CBE_NG_20nt_ | UGGAUUUCGGCAGUAGUUCU | 1171 |
| 4-9_028_+_ | | |
| 160601067_spCas9 | | |
| CBE_NGA_20nt_ | UGGAUUUCGGCAGUAGUUCU | 1172 |
| 3-16_035_+_ | | |
| 160601067_spCas9 | | |
| CBE_NNNRRT_21nt_ | AUCUGGAUUUCGGCAGUAGUU | 1173 |
| 3- | | |
| 12_015_+_ | | |
| 160601064_saCas9 | | |
| ABE_NGG_20nt_ | GAACAAAGACGUACGCAUUU | 1174 |
| 3-9_002_+_ | | |
| 160599485_spCas9 | | |
| ABE_NG_20nt_ | GAACAAAGACGUACGCAUUU | 1175 |
| 3-9_027_+_ | | |
| 160599485_spCas9 | | |
| ABE_NGG_20nt_ | GAACAAAGACGUACGCAUUU | 1176 |
| 3-12_018_+_ | | |
| 160599485_spCas9 | | |
| ABE_NNGRRT_21nt_ | AAAGAACAAAGACGUACGCAU | 1177 |
| 5- | | |
| 14_011_+_ | | |
| 160599482_saCas9 | | |
| ABE_NNNRRT_21nt_ | GAACAAAGACGUACGCAUUUG | 1178 |
| 5- | | |
| 14_014_+_ | | |
| 160599485_saCas9 | | |
| ABE_NG_20nt_ | AACAAAGACGUACGCAUUUG | 1179 |
| 3-9_027_+_ | | |
| 160599486_spCas9 | | |
| ABE_NG_20nt_ | AAAGACGUACGCAUUUGGGU | 1180 |
| 3-9_027_+_ | | |
| 160599489_spCas9 | | |
| ABE_NGG_20nt_ | AGAACAAAGACGUACGCAUU | 1181 |
| 3-12_018_+_ | | |
| 160599484_spCas9 | | |
| ABE_NGC_20nt_ | UAACACCAAGGACUAAUCUC | 1182 |
| 3-9_008_+_ | | |
| 160591044_spCas9 | | |
| ABE_NG_20nt_ | UAACACCAAGGACUAAUCUC | 1183 |
| 3-9_027_+_ | | |
| 160591044_spCas9 | | |
| ABE_NGC_20nt_ | UAACACCAAGGACUAAUCUC | 1184 |
| 3-12_020_+_ | | |
| 160591044_spCas9 | | |
| ABE_NRCH_20nt_ | UAACACCAAGGACUAAUCUC | 1185 |
| 3-9_024_+_ | | |
| 160591044_spCas9 | | |
| ABE_NGA_20nt_ | GAUCCAUGGUAUAACACCAA | 1186 |
| 13-16_034_+_ | | |
| 160591033_SpCas9 | | |
| CBE_NGA_20nt_ | GCGAUGCUCAGACACAGAAG | 1187 |
| 4-9_006_−_ | | |
| 160548537_spCas9 | | |
| CBE_NG_20nt_ | GCGAUGCUCAGACACAGAAG | 1188 |
| 4-9_028_−_ | | |
| 160548538_spCas9 | | |
| CBE_NGA_20nt_ | GCGAUGCUCAGACACAGAAG | 1189 |
| 3-16_035_−_ | | |
| 160548537_spCas9 | | |
| CBE_NNNRRT_21nt_ | AUGCUCAGACACAGAAGGGAC | 1190 |
| 3-12_015_- | | |
| 160548530_saCas9 | | |
| CBE_NG_20nt_ | UGCUCAGACACAGAAGGGAC | 1191 |
| 4-9_028_−_ | | |
| 160548534_spCas9 | | |
| CBE_NRCH_20nt_ | CGAUGCUCAGACACAGAAGG | 1192 |
| 3-9_030_−_ | | |
| 160548535_spCas9 | | |
| CBE_NGG_20nt_ | ACGCGAUGCUCAGACACAGA | 1193 |
| 3-16_033_−_ | | |
| 160548539_SpCas9 | | |
| CBE_NGG_20nt_ | CGCGAUGCUCAGACACAGAA | 1194 |
| 3-16_033_−_ | | |
| 160548538_SpCas9 | | |
| CBE_NGG_20nt_ | CUCAGACACAGAAGGGACUG | 1195 |
| 3-16_033_−_ | | |
| 160548531_SpCas9 | | |
| CBE_NGA_20nt_ | CUGACGCGAUGCUCAGACAC | 1196 |
| 3-16_035_−_ | | |
| 160548542_spCas9 | | |
| ABE_NGA_20nt_ | AACAAGGAGCUGGGCUUCCU | 1197 |
| 3-9_005_+_ | | |
| 160532605_spCas9 | | |
| ABE_NG_20nt_ | AACAAGGAGCUGGGCUUCCU | 1198 |
| 3-9_027_+_ | | |
| 160532605_spCas9 | | |
| ABE_NGA_20nt_ | AACAAGGAGCUGGGCUUCCU | 1199 |
| 3-12_019_+_ | | |
| 160532605_spCas9 | | |
| ABE_NGA_20nt_ | CAAGGAGCUGGGCUUCCUUG | 1200 |
| 3-9_005_+_ | | |
| 160532607_spCas9 | | |
| ABE_NG_20nt_ | CAAGGAGCUGGGCUUCCUUG | 1201 |
| 3-9_027_+_ | | |
| 160532607_spCas9 | | |
| ABE_NGA_20nt_ | CAAGGAGCUGGGCUUCCUUG | 1202 |
| 3-12_019_+_ | | |
| 160532607_spCas9 | | |
| ABE_NGG_20nt_ | CAUUCUCAAUAACAAGGAGC | 1203 |
| 13-16_032_+_ | | |
| 160532595_SpCas9 | | |
| ABE_NGG_20nt_ | AUUCUCAAUAACAAGGAGCU | 1204 |
| 13-16_032_+_ | | |
| 160532596_SpCas9 | | |
| CBE_NGC_20nt_ | UCUUACCUGGCAACUGUCAG | 1205 |
| 4-9_009_+_ | | |
| 160532524_spCas9 | | |
| CBE_NG_20nt_ | UCUUACCUGGCAACUGUCAG | 1206 |
| 4-9_028_+_ | | |
| 160532524_spCas9 | | |
| CBE_NRCH_20nt_ | UCUUACCUGGCAACUGUCAG | 1207 |
| 3-9_030_+_ | | |
| 160532524_spCas9 | | |
| CBE_NG_20nt_ | UUUCUUACCUGGCAACUGUC | 1208 |
| 4-9_028_+_ | | |
| 160532522_spCas9 | | |
| ABE_NGG_20nt_ | GUGUCUAUGCUCGUGUUUCA | 1209 |
| 3-9_002_−_ | | |
| 160531767_spCas9 | | |
| ABE_NG_20nt_ | GUGUCUAUGCUCGUGUUUCA | 1210 |
| 3-9_027_−_ | | |
| 160531768_spCas9 | | |
| ABE_NGG_20nt_ | GUGUCUAUGCUCGUGUUUCA | 1211 |
| 3-12_018_−_ | | |
| 160531767_spCas9 | | |
| ABE_NNNRRT_21nt_ | CUGGUGUCUAUGCUCGUGUUU | 1212 |
| 5-14_014_- | | |
| 160531766_saCas9 | | |
| ABE_NG_20nt_ | UGUCUAUGCUCGUGUUUCAA | 1213 |
| 3-9_027_−_ | | |
| 160531767_spCas9 | | |

TABLE 1B-1
Exemplary guide polynucleotide sequences for use in targeting a base editor to
disrupt a splice site or introduce a start codon in an LPA polynucleotide.

| | | SEQ |
|---|---|---|
| Guide Name | Guide Polynucleotide Sequence | ID NO |
| ABE_NGA_20 nt_3- | mAsmAsmAsCGUACUUCUUCAAGCAGGUUUUAGAGCU | 1216 |
| 9_005_+_160541098_spCas9 | AGAAAUAGCAAGUUAAAAUAAGGCUAGUCCGUUAUCA | |
| | ACUUGAAAAAGUGGCACCGAGUCGGUGCmUsmUsmUs | |
| | U | |
| CBE_NGA_20 nt_4- | mAsmAsmAsCGUACUUCUUCAAGCAGGUUUUAGAGCU | 1217 |
| 9_006_+_160541098_spCas9 | AGAAAUAGCAAGUUAAAAUAAGGCUAGUCCGUUAUCA | |
| | ACUUGAAAAAGUGGCACCGAGUCGGUGCmUsmUsmUs | |
| | U | |
| CBE_NGG_20 nt_4- | mAsmAsmAsACACCAAGGGCCUGUAUGUUUUAGAGCU | 1214 |
| 9_003_+_160548601_spCas9 | AGAAAUAGCAAGUUAAAAUAAGGCUAGUCCGUUAUCA | |
| | ACUUGAAAAAGUGGCACCGAGUCGGUGCmUsmUsmUs | |
| | U | |
| CBE_NGC_20 nt_4- | mAsmAsmAsCACCAAGGGCCUGUAUCGUUUUAGAGCU | 1215 |
| 9_009_+_160548602_spCas9 | AGAAAUAGCAAGUUAAAAUAAGGCUAGUCCGUUAUCA | |
| | ACUUGAAAAAGUGGCACCGAGUCGGUGCmUsmUsmUs | |
| | U | |
| ABE_NGG_20 nt_3-9_002_−_ | mAsmAsmCsACAGGUACCUUUGGGACGUUUUAGAGCU | 1218 |
| 160532633_spCas9 | AGAAAUAGCAAGUUAAAAUAAGGCUAGUCCGUUAUCA | |
| | ACUUGAAAAAGUGGCACCGAGUCGGUGCmUsmUsmUs | |
| | U | |
| CBE_NGA_20 nt_4- | mAsmAsmCsACCAAGGGGCUGCCACAGUUUUAGAGCU | 1219 |
| 9_006_+_160601042_spCas9 | AGAAAUAGCAAGUUAAAAUAAGGCUAGUCCGUUAUCA | |
| | ACUUGAAAAAGUGGCACCGAGUCGGUGCmUsmUsmUs | |
| | U | |
| CBE_NGA_20 nt_4- | mAsmAsmGsCCACUGGAAAUUCCAAAGUUUUAGAGCU | 1220 |
| 9_006_+_160601092_spCas9 | AGAAAUAGCAAGUUAAAAUAAGGCUAGUCCGUUAUCA | |
| | ACUUGAAAAAGUGGCACCGAGUCGGUGCmUsmUsmUs | |
| | U | |
| CBE_NGA_20 nt_4- | mAsmAsmGsGCAGUCCAUUCUGCAUCGUUUUAGAGCU | 1221 |
| 9_006_+_160600969_spCas9 | AGAAAUAGCAAGUUAAAAUAAGGCUAGUCCGUUAUCA | |
| | ACUUGAAAAAGUGGCACCGAGUCGGUGCmUsmUsmUs | |
| | U | |
| ABE_NGG_20 nt_3- | mAsmAsmUsUUCUUACCUUGUUCAGAGUUUUAGAGCU | 1222 |
| 9_002_+_160578512_spCas9 | AGAAAUAGCAAGUUAAAAUAAGGCUAGUCCGUUAUCA | |
| | ACUUGAAAAAGUGGCACCGAGUCGGUGCmUsmUsmUs | |
| | U | |
| ABE_NGC_20 nt_3-9_008_−_ | mAsmCsmAsCAGGUACCUUUGGGACUGUUUUAGAGCU | 1223 |
| 160532632_spCas9 | AGAAAUAGCAAGUUAAAAUAAGGCUAGUCCGUUAUCA | |
| | ACUUGAAAAAGUGGCACCGAGUCGGUGCmUsmUsmUs | |
| | U | |
| CBE_NGG_20 nt_4-9_003_−_ | mAsmCsmAsGUCCAGGACUGCUACCAGUUUUAGAGCU | 1224 |
| 160589669_spCas9 | AGAAAUAGCAAGUUAAAAUAAGGCUAGUCCGUUAUCA | |
| | ACUUGAAAAAGUGGCACCGAGUCGGUGCmUsmUsmUs | |
| | U | |
| CBE_NGG_20 nt_4-9_003_−_ | mAsmCsmGsCGAUGCUCAGACACAGAGUUUUAGAGCU | 1225 |
| 160548539_spCas9 | AGAAAUAGCAAGUUAAAAUAAGGCUAGUCCGUUAUCA | |
| | ACUUGAAAAAGUGGCACCGAGUCGGUGCmUsmUsmUs | |
| | U | |
| ABE_NGC_20 nt_3- | mAsmCsmGsUACUUCUUCAAGCAGUGGUUUUAGAGCU | 1226 |
| 9_008_+_160541100_spCas9 | AGAAAUAGCAAGUUAAAAUAAGGCUAGUCCGUUAUCA | |
| | ACUUGAAAAAGUGGCACCGAGUCGGUGCmUsmUsmUs | |
| | U | |
| CBE_NGC_20 nt_4- | mAsmCsmGsUACUUCUUCAAGCAGUGGUUUUAGAGCU | 1227 |
| 9_009_+_160541100_spCas9 | AGAAAUAGCAAGUUAAAAUAAGGCUAGUCCGUUAUCA | |
| | ACUUGAAAAAGUGGCACCGAGUCGGUGCmUsmUsmUs | |
| | U | |
| CBE_NGA_20 nt_4-9_006_−_ | mAsmGsmCsCCAGCUCCUUGUUAUUGGUUUUAGAGCU | 1228 |
| 160532598_spCas9 | AGAAAUAGCAAGUUAAAAUAAGGCUAGUCCGUUAUCA | |
| | ACUUGAAAAAGUGGCACCGAGUCGGUGCmUsmUsmUs | |
| | U | |
| CBE_NGG_20 nt_4- | mAsmGsmGsAUGCUGUGGCACAAGGUGUUUUAGAGCU | 1229 |
| 9_003_+_160542802_spCas9 | AGAAAUAGCAAGUUAAAAUAAGGCUAGUCCGUUAUCA | |
| | ACUUGAAAAAGUGGCACCGAGUCGGUGCmUsmUsmUs | |
| | U | |
| CBE_NGC_20 nt_4- | mAsmGsmGsCCUGUAAGGAAAGUAUUGUUUUAGAGCU | 1230 |
| 9_009_+_160537957_spCas9 | AGAAAUAGCAAGUUAAAAUAAGGCUAGUCCGUUAUCA | |
| | ACUUGAAAAAGUGGCACCGAGUCGGUGCmUsmUsmUs | |
| | U | |
| CBE_NGA_20 nt_4- | mAsmGsmUsACUCCCACCUCACACACGUUUUAGAGCU | 1231 |
| 9_006_+_160557482_spCas9 | AGAAAUAGCAAGUUAAAAUAAGGCUAGUCCGUUAUCA | |
| | ACUUGAAAAAGUGGCACCGAGUCGGUGCmUsmUsmUs | |
| | U | |
| CBE_NGA_20 nt_4- | mAsmGsmUsGCUGAAAUUAAAACAGAGUUUUAGAGCU | 1232 |
| 9_006_+_160599655_spCas9 | AGAAAUAGCAAGUUAAAAUAAGGCUAGUCCGUUAUCA | |
| | ACUUGAAAAAGUGGCACCGAGUCGGUGCmUsmUsmUs | |
| | U | |
| CBE_NGA_20 nt_4-9_006_−_ | mAsmUsmGsUCAAUCUUGGUCAUCCAGUUUUAGAGCU | 1233 |
| 160556067_spCas9 | AGAAAUAGCAAGUUAAAAUAAGGCUAGUCCGUUAUCA | |
| | ACUUGAAAAAGUGGCACCGAGUCGGUGCmUsmUsmUs | |
| | U | |
| CBE_NGC_20 nt_4-9_009_−_ | mAsmUsmUsAUGGACAGAGUUACCGAGUUUUAGAGCU | 1234 |
| 160599594_spCas9 | AGAAAUAGCAAGUUAAAAUAAGGCUAGUCCGUUAUCA | |
| | ACUUGAAAAAGUGGCACCGAGUCGGUGCmUsmUsmUs | |
| | U | |
| CBE_NGC_20 nt_4-9_009_−_ | mCsmAsmCsACAAGCAGAUAUUGCCUGUUUUAGAGCU | 1235 |
| 160540055_spCas9 | AGAAAUAGCAAGUUAAAAUAAGGCUAGUCCGUUAUCA | |
| | ACUUGAAAAAGUGGCACCGAGUCGGUGCmUsmUsmUs | |
| | U | |
| CBE_NGA_20 nt_4-9_006_−_ | mCsmAsmCsCAGCAUAGUCGGACCCCGUUUUAGAGCU | 1236 |
| 160599514_spCas9 | AGAAAUAGCAAGUUAAAAUAAGGCUAGUCCGUUAUCA | |
| | ACUUGAAAAAGUGGCACCGAGUCGGUGCmUsmUsmUs | |
| | U | |
| CBE_NGG_20 nt_4- | mCsmAsmGsUACUCCCACCUCACACAGUUUUAGAGCU | 1237 |
| 9_003_+_160557481_spCas9 | AGAAAUAGCAAGUUAAAAUAAGGCUAGUCCGUUAUCA | |
| | ACUUGAAAAAGUGGCACCGAGUCGGUGCmUsmUsmUs | |
| | U | |
| CBE_NGA_20 nt_4-9_006_−_ | mCsmAsmUsCAACAUAAUAGGACCACGUUUUAGAGCU | 1238 |
| 160650352_spCas9 | AGAAAUAGCAAGUUAAAAUAAGGCUAGUCCGUUAUCA | |
| | ACUUGAAAAAGUGGCACCGAGUCGGUGCmUsmUsmUs | |
| | U | |
| CBE_NGC_20 nt_4-9_009_−_ | mCsmAsmUsCCAGGUUCCAAGCCUAGGUUUUAGAGCU | 1239 |
| 160548492_spCas9 | AGAAAUAGCAAGUUAAAAUAAGGCUAGUCCGUUAUCA | |
| | ACUUGAAAAAGUGGCACCGAGUCGGUGCmUsmUsmUs | |
| | U | |
| CBE_NGC_20 nt_4- | mCsmCsmAsAACCUAGAAAGAAAACAGUUUUAGAGCU | 1240 |
| 9_009_+_160541175_spCas9 | AGAAAUAGCAAGUUAAAAUAAGGCUAGUCCGUUAUCA | |
| | ACUUGAAAAAGUGGCACCGAGUCGGUGCmUsmUsmUs | |
| | U | |
| CBE_NGG_20 nt_4- | mCsmCsmUsGCCCAUUUAUUUGUCCCGUUUUAGAGCU | 1241 |
| 9_003_+_160547801_spCas9 | AGAAAUAGCAAGUUAAAAUAAGGCUAGUCCGUUAUCA | |
| | ACUUGAAAAAGUGGCACCGAGUCGGUGCmUsmUsmUs | |
| | U | |
| CBE_NGA_20 nt_4- | mCsmGsmAsUGCCAAUGUGGUGUCAUGUUUUAGAGCU | 1242 |
| 9_006_+_160585072_spCas9 | AGAAAUAGCAAGUUAAAAUAAGGCUAGUCCGUUAUCA | |
| | ACUUGAAAAAGUGGCACCGAGUCGGUGCmUsmUsmUs | |
| | U | |
| CBE_NGG_20 nt_4-9_003_−_ | mCsmGsmGsCAGUGCUACCAUGGUAAGUUUUAGAGCU | 1243 |
| 160556135_spCas9 | AGAAAUAGCAAGUUAAAAUAAGGCUAGUCCGUUAUCA | |
| | ACUUGAAAAAGUGGCACCGAGUCGGUGCmUsmUsmUs | |
| | U | |
| CBE_NGG_20 nt_4- | mCsmUsmCsCCACCUCACACACGGAUGUUUUAGAGCU | 1244 |
| 9_003_+_160557486_spCas9 | AGAAAUAGCAAGUUAAAAUAAGGCUAGUCCGUUAUCA | |
| | ACUUGAAAAAGUGGCACCGAGUCGGUGCmUsmUsmUs | |
| | U | |
| CBE_NGA_20 nt_4-9_006_−_ | mCsmUsmGsACACAAUGCCUGGUGACGUUUUAGAGCU | 1245 |
| 160595418_spCas9 | AGAAAUAGCAAGUUAAAAUAAGGCUAGUCCGUUAUCA | |
| | ACUUGAAAAAGUGGCACCGAGUCGGUGCmUsmUsmUs | |
| | U | |
| CBE_NGA_20 nt_4-9_006_−_ | mCsmUsmGsACACAAUGCUCAGAAACGUUUUAGAGCU | 1246 |
| 160557454_spCas9 | AGAAAUAGCAAGUUAAAAUAAGGCUAGUCCGUUAUCA | |
| | ACUUGAAAAAGUGGCACCGAGUCGGUGCmUsmUsmUs | |
| | U | |
| CBE_NGA_20 nt_4-9_006_−_ | mCsmUsmGsACACGAUGCUCAGAUGCGUUUUAGAGCU | 1247 |
| 160600981_spCas9 | AGAAAUAGCAAGUUAAAAUAAGGCUAGUCCGUUAUCA | |
| | ACUUGAAAAAGUGGCACCGAGUCGGUGCmUsmUsmUs | |
| | U | |
| CBE_NGA_20 nt_4-9_006_−_ | mCsmUsmGsACGCAAUGUCCAGUGAUGUUUUAGAGCU | 1248 |
| 160586513_spCas9 | AGAAAUAGCAAGUUAAAAUAAGGCUAGUCCGUUAUCA | |
| | ACUUGAAAAAGUGGCACCGAGUCGGUGCmUsmUsmUs | |
| | U | |
| CBE_NGA_20 nt_4-9_006_−_ | mCsmUsmGsACGCGAUGCUCAGACACGUUUUAGAGCU | 1249 |
| 160548542_spCas9 | AGAAAUAGCAAGUUAAAAUAAGGCUAGUCCGUUAUCA | |
| | ACUUGAAAAAGUGGCACCGAGUCGGUGCmUsmUsmUs | |
| | U | |
| CBE_NGA_20 nt_4- | mCsmUsmGsCCCAUUUAUUUGUCCCUGUUUUAGAGCU | 1250 |
| 9_006_+_160547802_spCas9 | AGAAAUAGCAAGUUAAAAUAAGGCUAGUCCGUUAUCA | |
| | ACUUGAAAAAGUGGCACCGAGUCGGUGCmUsmUsmUs | |
| | U | |
| CBE_NGG_20 nt_4-9_003_−_ | mCsmUsmGsCCGAAAUCCAGAUCCUGGUUUUAGAGCU | 1251 |
| 160601057_spCas9 | AGAAAUAGCAAGUUAAAAUAAGGCUAGUCCGUUAUCA | |
| | ACUUGAAAAAGUGGCACCGAGUCGGUGCmUsmUsmUs | |
| | U | |
| CBE_NGA_20 nt_4-9_006_−_ | mCsmUsmGsCUACCGAGGUGAUGGACGUUUUAGAGCU | 1252 |
| 160585151_spCas9 | AGAAAUAGCAAGUUAAAAUAAGGCUAGUCCGUUAUCA | |
| | ACUUGAAAAAGUGGCACCGAGUCGGUGCmUsmUsmUs | |
| | U | |
| CBE_NGA_20 nt_4-9_006_−_ | mCsmUsmGsGGGUCCAGGACUGCUACGUUUUAGAGCU | 1253 |
| 160585164_spCas9 | AGAAAUAGCAAGUUAAAAUAAGGCUAGUCCGUUAUCA | |
| | ACUUGAAAAAGUGGCACCGAGUCGGUGCmUsmUsmUs | |
| | U | |
| CBE_NGA_20 nt_4-9_006_−_ | mCsmUsmGsUCAAUCUUGGUCAUCUAGUUUUAGAGCU | 1254 |
| 160577178_spCas9 | AGAAAUAGCAAGUUAAAAUAAGGCUAGUCCGUUAUCA | |
| | ACUUGAAAAAGUGGCACCGAGUCGGUGCmUsmUsmUs | |
| | U | |
| CBE_NGG_20 nt_4- | mCsmUsmGsUCACCCUAAACAGAGGUGUUUUAGAGCU | 1255 |
| 9_003_+_160531882_spCas9 | AGAAAUAGCAAGUUAAAAUAAGGCUAGUCCGUUAUCA | |
| | ACUUGAAAAAGUGGCACCGAGUCGGUGCmUsmUsmUs | |
| | U | |
| ABE_NGG_20 nt_3-9_002_−_ | mCsmUsmGsUUUAGGGUGACAGUGGAGUUUUAGAGCU | 1256 |
| 160531875_spCas9 | AGAAAUAGCAAGUUAAAAUAAGGCUAGUCCGUUAUCA | |
| | ACUUGAAAAAGUGGCACCGAGUCGGUGCmUsmUsmUs | |
| | U | |
| CBE_NGC_20 nt_4-9_009_−_ | mGsmAsmAsAUGGACAGAGUUAUCAAGUUUUAGAGCU | 1257 |
| 160605140_spCas9 | AGAAAUAGCAAGUUAAAAUAAGGCUAGUCCGUUAUCA | |
| | ACUUGAAAAAGUGGCACCGAGUCGGUGCmUsmUsmUs | |
| | U | |
| CBE_NGC_20 nt_4-9_009_−_ | mGsmAsmAsCAAGGUAAGAAGUCUCUGUUUUAGAGCU | 1258 |
| 160590927_spCas9 | AGAAAUAGCAAGUUAAAAUAAGGCUAGUCCGUUAUCA | |
| | ACUUGAAAAAGUGGCACCGAGUCGGUGCmUsmUsmUs | |
| | U | |
| CBE_NGA_20 nt_4-9_006_−_ | mGsmAsmAsGCCCAGCUCCUUGUUAUGUUUUAGAGCU | 1259 |
| 160532600_spCas9 | AGAAAUAGCAAGUUAAAAUAAGGCUAGUCCGUUAUCA | |
| | ACUUGAAAAAGUGGCACCGAGUCGGUGCmUsmUsmUs | |
| | U | |
| ABE_NGA_20 nt_3- | mGsmAsmCsUUCCUACCUUCUUCAGAGUUUUAGAGCU | 1260 |
| 9_005_+_160595343_spCas9 | AGAAAUAGCAAGUUAAAAUAAGGCUAGUCCGUUAUCA | |
| | ACUUGAAAAAGUGGCACCGAGUCGGUGCmUsmUsmUs | |
| | U | |
| ABE_NGG_20 nt_3- | mGsmAsmCsUUCUUACCUUGUUCAGAGUUUUAGAGCU | 1261 |
| 9_002_+_160548467_spCas9 | AGAAAUAGCAAGUUAAAAUAAGGCUAGUCCGUUAUCA | |
| | ACUUGAAAAAGUGGCACCGAGUCGGUGCmUsmUsmUs | |
| | U | |
| CBE_NGA_20 nt_4-9_006_−_ | mGsmAsmGsCAAAGCCAUGUGGUCCAGUUUUAGAGCU | 1262 |
| 160650466_spCas9 | AGAAAUAGCAAGUUAAAAUAAGGCUAGUCCGUUAUCA | |
| | ACUUGAAAAAGUGGCACCGAGUCGGUGCmUsmUsmUs | |
| | U | |
| CBE_NGA_20 nt_4-9_006_−_ | mGsmAsmGsCAAAGCCCCACAGUCCAGUUUUAGAGCU | 1263 |
| 160589681_spCas9 | AGAAAUAGCAAGUUAAAAUAAGGCUAGUCCGUUAUCA | |
| | ACUUGAAAAAGUGGCACCGAGUCGGUGCmUsmUsmUs | |
| | U | |
| CBE_NGA_20 nt_4-9_006_−_ | mGsmAsmGsCAAAGCCCCGGGGUCCAGUUUUAGAGCU | 1264 |
| 160594086_spCas9 | AGAAAUAGCAAGUUAAAAUAAGGCUAGUCCGUUAUCA | |
| | ACUUGAAAAAGUGGCACCGAGUCGGUGCmUsmUsmUs | |
| | U | |
| CBE_NGG_20 nt_4- | mGsmAsmGsGAUGCUGUGGCACAAGGGUUUUAGAGCU | 1265 |
| 9_003_+_160542801_spCas9 | AGAAAUAGCAAGUUAAAAUAAGGCUAGUCCGUUAUCA | |
| | ACUUGAAAAAGUGGCACCGAGUCGGUGCmUsmUsmUs | |
| | U | |
| ABE_NGA_20 nt_3-9_005_−_ | mGsmCsmCsACAGCAUCCUCUUCAUUGUUUUAGAGCU | 1266 |
| 160542792_spCas9 | AGAAAUAGCAAGUUAAAAUAAGGCUAGUCCGUUAUCA | |
| | ACUUGAAAAAGUGGCACCGAGUCGGUGCmUsmUsmUs | |
| | U | |
| ABE_NGA_20 nt_3- | mGsmCsmUsCCUUACCUUGUUCAGAAGUUUUAGAGCU | 1267 |
| 9_005_+_160606467_spCas9 | AGAAAUAGCAAGUUAAAAUAAGGCUAGUCCGUUAUCA | |
| | ACUUGAAAAAGUGGCACCGAGUCGGUGCmUsmUsmUs | |
| | U | |
| CBE_NGA_20 nt_4- | mGsmCsmUsCCUUACCUUGUUCAGAAGUUUUAGAGCU | 1268 |
| 9_006_+_160606467_spCas9 | AGAAAUAGCAAGUUAAAAUAAGGCUAGUCCGUUAUCA | |
| | ACUUGAAAAAGUGGCACCGAGUCGGUGCmUsmUsmUs | |
| | U | |
| CBE_NGA_20 nt_4- | mGsmCsmUsGCUAAAAUUAAAACAGAGUUUUAGAGCU | 1269 |
| 9_006_+_160650493_spCas9 | AGAAAUAGCAAGUUAAAAUAAGGCUAGUCCGUUAUCA | |
| | ACUUGAAAAAGUGGCACCGAGUCGGUGCmUsmUsmUs | |
| | U | |
| ABE_NGA_20 nt_3- | mGsmCsmUsUCUUACCUUCUUCAGAAGUUUUAGAGCU | 1270 |
| 9_005_+_160586439_spCas9 | AGAAAUAGCAAGUUAAAAUAAGGCUAGUCCGUUAUCA | |
| | ACUUGAAAAAGUGGCACCGAGUCGGUGCmUsmUsmUs | |
| | U | |
| CBE_NGA_20 nt_4- | mGsmCsmUsUCUUACCUUCUUCAGAAGUUUUAGAGCU | 1271 |
| 9_006_+_160586439_spCas9 | AGAAAUAGCAAGUUAAAAUAAGGCUAGUCCGUUAUCA | |
| | ACUUGAAAAAGUGGCACCGAGUCGGUGCmUsmUsmUs | |
| | U | |
| CBE_NGG_20 nt_4-9_003_−_ | mGsmGsmAsGCAAAGCCCCACAGUCCGUUUUAGAGCU | 1272 |
| 160589682_spCas9 | AGAAAUAGCAAGUUAAAAUAAGGCUAGUCCGUUAUCA | |
| | ACUUGAAAAAGUGGCACCGAGUCGGUGCmUsmUsmUs | |
| | U | |
| CBE_NGG_20 nt_4-9_003_−_ | mGsmGsmAsGCAAAGCCCCGGGGUCCGUUUUAGAGCU | 1273 |
| 160594087_spCas9 | AGAAAUAGCAAGUUAAAAUAAGGCUAGUCCGUUAUCA | |
| | ACUUGAAAAAGUGGCACCGAGUCGGUGCmUsmUsmUs | |
| | U | |
| CBE_NGA_20 nt_4- | mGsmGsmAsUGCUGUGGCACAAGGUGGUUUUAGAGCU | 1274 |
| 9_006_+_160542803_spCas9 | AGAAAUAGCAAGUUAAAAUAAGGCUAGUCCGUUAUCA | |
| | ACUUGAAAAAGUGGCACCGAGUCGGUGCmUsmUsmUs | |
| | U | |
| CBE_NGC_20 nt_4- | mGsmGsmCsAGUCCAUUCUGCAUCUGGUUUUAGAGCU | 1275 |
| 9_009_+_160600971_spCas9 | AGAAAUAGCAAGUUAAAAUAAGGCUAGUCCGUUAUCA | |
| | ACUUGAAAAAGUGGCACCGAGUCGGUGCmUsmUsmUs | |
| | U | |
| ABE_NGG_20 nt_3- | mGsmGsmCsUCCUUACCUUGUUCAGAGUUUUAGAGCU | 1276 |
| 9_002_+_160606466_spCas9 | AGAAAUAGCAAGUUAAAAUAAGGCUAGUCCGUUAUCA | |
| | ACUUGAAAAAGUGGCACCGAGUCGGUGCmUsmUsmUs | |
| | U | |
| ABE_NGG_20 nt_3- | mGsmGsmCsUUCUUACCUUCUUCAGAGUUUUAGAGCU | 1277 |
| 9_002_+_160586438_spCas9 | AGAAAUAGCAAGUUAAAAUAAGGCUAGUCCGUUAUCA | |
| | ACUUGAAAAAGUGGCACCGAGUCGGUGCmUsmUsmUs | |
| | U | |
| CBE_NGG_20 nt_4-9_003_−_ | mGsmGsmGsGUCCAGGACUGCUACCGGUUUUAGAGCU | 1278 |
| 160585162_spCas9 | AGAAAUAGCAAGUUAAAAUAAGGCUAGUCCGUUAUCA | |
| | ACUUGAAAAAGUGGCACCGAGUCGGUGCmUsmUsmUs | |
| | U | |
| CBE_NGA_20 nt_4-9_006_−_ | mGsmGsmGsUGCAGGAGUGCUACCACGUUUUAGAGCU | 1279 |
| 160605161_spCas9 | AGAAAUAGCAAGUUAAAAUAAGGCUAGUCCGUUAUCA | |
| | ACUUGAAAAAGUGGCACCGAGUCGGUGCmUsmUsmUs | |
| | U | |
| CBE_NGA_20 nt_4- | mGsmGsmUsGCUGAAAUGAAAAGAAAGUUUUAGAGCU | 1280 |
| 9_006_+_160605201_spCas9 | AGAAAUAGCAAGUUAAAAUAAGGCUAGUCCGUUAUCA | |
| | ACUUGAAAAAGUGGCACCGAGUCGGUGCmUsmUsmUs | |
| | U | |
| CBE_NGA_20 nt_4- | mGsmGsmUsGCUGCUAAAAUUAAAACGUUUUAGAGCU | 1281 |
| 9_006_+_160650490_spCas9 | AGAAAUAGCAAGUUAAAAUAAGGCUAGUCCGUUAUCA | |
| | ACUUGAAAAAGUGGCACCGAGUCGGUGCmUsmUsmUs | |
| | U | |
| CBE_NGG_20 nt_4- | mGsmUsmCsACCCUAAACAGAGGUAGGUUUUAGAGCU | 1282 |
| 9_003_+_160531884_spCas9 | AGAAAUAGCAAGUUAAAAUAAGGCUAGUCCGUUAUCA | |
| | ACUUGAAAAAGUGGCACCGAGUCGGUGCmUsmUsmUs | |
| | U | |
| CBE_NGA_20 nt_4- | mGsmUsmCsAGUGCUGAAAUUAAAACGUUUUAGAGCU | 1283 |
| 9_006_+_160599652_spCas9 | AGAAAUAGCAAGUUAAAAUAAGGCUAGUCCGUUAUCA | |
| | ACUUGAAAAAGUGGCACCGAGUCGGUGCmUsmUsmUs | |
| | U | |
| CBE_NGG_20 nt_4-9_003_−_ | mGsmUsmCsAUCCAGGUUCCAAGCCUGUUUUAGAGCU | 1284 |
| 160548494_spCas9 | AGAAAUAGCAAGUUAAAAUAAGGCUAGUCCGUUAUCA | |
| | ACUUGAAAAAGUGGCACCGAGUCGGUGCmUsmUsmUs | |
| | U | |
| CBE_NGA_20 nt_4-9_006_−_ | mGsmUsmCsCAGGACUGCUACCGAGGGUUUUAGAGCU | 1285 |
| 160585159_spCas9 | AGAAAUAGCAAGUUAAAAUAAGGCUAGUCCGUUAUCA | |
| | ACUUGAAAAAGUGGCACCGAGUCGGUGCmUsmUsmUs | |
| | U | |
| CBE_NGC_20 nt_4- | mUsmAsmAsCACCAAGGACUAAUCUCGUUUUAGAGCU | 1286 |
| 9_009_+_160591044_spCas9 | AGAAAUAGCAAGUUAAAAUAAGGCUAGUCCGUUAUCA | |
| | ACUUGAAAAAGUGGCACCGAGUCGGUGCmUsmUsmUs | |
| | U | |
| CBE_NGG_20 nt_4- | mUsmAsmAsCACCAAGGGGCUGCCACGUUUUAGAGCU | 1287 |
| 9_003_+_160601041_spCas9 | AGAAAUAGCAAGUUAAAAUAAGGCUAGUCCGUUAUCA | |
| | ACUUGAAAAAGUGGCACCGAGUCGGUGCmUsmUsmUs | |
| | U | |
| CBE_NGA_20 nt_4- | mUsmAsmAsCACCAGGGUUGUUUCCCGUUUUAGAGCU | 1288 |
| 9_006_+_160557514_spCas9 | AGAAAUAGCAAGUUAAAAUAAGGCUAGUCCGUUAUCA | |
| | ACUUGAAAAAGUGGCACCGAGUCGGUGCmUsmUsmUs | |
| | U | |
| ABE_NGA_20 nt_3-9_005_−_ | mUsmAsmCsAGGCCUGCCGUCAUCACGUUUUAGAGCU | 1289 |
| 160537943_spCas9 | AGAAAUAGCAAGUUAAAAUAAGGCUAGUCCGUUAUCA | |
| | ACUUGAAAAAGUGGCACCGAGUCGGUGCmUsmUsmUs | |
| | U | |
| CBE_NGA_20 nt_4- | mUsmCsmAsCCCUAAACAGAGGUAGGGUUUUAGAGCU | 1290 |
| 9_006_+_160531885_spCas9 | AGAAAUAGCAAGUUAAAAUAAGGCUAGUCCGUUAUCA | |
| | ACUUGAAAAAGUGGCACCGAGUCGGUGCmUsmUsmUs | |
| | U | |
| CBE_NGG_20 nt_4-9_003_−_ | mUsmCsmAsUCCAGGUUCCAAGCCUAGUUUUAGAGCU | 1291 |
| 160548493_spCas9 | AGAAAUAGCAAGUUAAAAUAAGGCUAGUCCGUUAUCA | |
| | ACUUGAAAAAGUGGCACCGAGUCGGUGCmUsmUsmUs | |
| | U | |
| CBE_NGG_20 nt_4-9_003_−_ | mUsmGsmAsACAAGGUAAGAAAUUUGGUUUUAGAGCU | 1292 |
| 160578507_spCas9 | AGAAAUAGCAAGUUAAAAUAAGGCUAGUCCGUUAUCA | |
| | ACUUGAAAAAGUGGCACCGAGUCGGUGCmUsmUsmUs | |
| | U | |
| CBE_NGG_20 nt_4-9_003_−_ | mUsmGsmAsACAAGGUAAGAAGUCUCGUUUUAGAGCU | 1293 |
| 160590928_spCas9 | AGAAAUAGCAAGUUAAAAUAAGGCUAGUCCGUUAUCA | |
| | ACUUGAAAAAGUGGCACCGAGUCGGUGCmUsmUsmUs | |
| | U | |
| CBE_NGG_20 nt_4-9_003_−_ | mUsmGsmAsACAAGGUAAGGAGCCUGGUUUUAGAGCU | 1294 |
| 160606461_spCas9 | AGAAAUAGCAAGUUAAAAUAAGGCUAGUCCGUUAUCA | |
| | ACUUGAAAAAGUGGCACCGAGUCGGUGCmUsmUsmUs | |
| | U | |
| CBE_NGG_20 nt_4-9_003_−_ | mUsmGsmAsGCAAAGCCAUGUGGUCCGUUUUAGAGCU | 1295 |
| 160650467_spCas9 | AGAAAUAGCAAGUUAAAAUAAGGCUAGUCCGUUAUCA | |
| | ACUUGAAAAAGUGGCACCGAGUCGGUGCmUsmUsmUs | |
| | U | |
| CBE_NGC_20 nt_4-9_009_−_ | mUsmGsmCsCGAAAUCCAGAUCCUGUGUUUUAGAGCU | 1296 |
| 160601056_spCas9 | AGAAAUAGCAAGUUAAAAUAAGGCUAGUCCGUUAUCA | |
| | ACUUGAAAAAGUGGCACCGAGUCGGUGCmUsmUsmUs | |
| | U | |
| CBE_NGG_20 nt_4- | mUsmGsmUsCACCCUAAACAGAGGUAGUUUUAGAGCU | 1297 |
| 9_003_+_160531883_spCas9 | AGAAAUAGCAAGUUAAAAUAAGGCUAGUCCGUUAUCA | |
| | ACUUGAAAAAGUGGCACCGAGUCGGUGCmUsmUsmUs | |
| | U | |
| ABE_NGC_20 nt_3-9_008_−_ | mUsmGsmUsUUAGGGUGACAGUGGAGGUUUUAGAGCU | 1298 |
| 160531874_spCas9 | AGAAAUAGCAAGUUAAAAUAAGGCUAGUCCGUUAUCA | |
| | ACUUGAAAAAGUGGCACCGAGUCGGUGCmUsmUsmUs | |
| | U | |
| ABE_NGA_20 nt_3-9_005_−_ | mUsmUsmAsAUUUCAGCACUGACUGAGUUUUAGAGCU | 1299 |
| 160599646_spCas9 | AGAAAUAGCAAGUUAAAAUAAGGCUAGUCCGUUAUCA | |
| | ACUUGAAAAAGUGGCACCGAGUCGGUGCmUsmUsmUs | |
| | U | |
| ABE_NGC_20 nt_3- | mUsmUsmCsCUACCUUCUUCAGAAGAGUUUUAGAGCU | 1300 |
| 9_008_+_160595346_spCas9 | AGAAAUAGCAAGUUAAAAUAAGGCUAGUCCGUUAUCA | |
| | ACUUGAAAAAGUGGCACCGAGUCGGUGCmUsmUsmUs | |
| | U | |
| CBE_NGC_20 nt_4- | mUsmUsmCsCUACCUUCUUCAGAAGAGUUUUAGAGCU | 1301 |
| 9_009_+_160595346_spCas9 | AGAAAUAGCAAGUUAAAAUAAGGCUAGUCCGUUAUCA | |
| | ACUUGAAAAAGUGGCACCGAGUCGGUGCmUsmUsmUs | |
| | U | |
| ABE_NGA_20 nt_3-9_005_−_ | mUsmUsmCsUACAGACUGUAUGUUUGGUUUUAGAGCU | 1302 |
| 160547922_spCas9 | AGAAAUAGCAAGUUAAAAUAAGGCUAGUCCGUUAUCA | |
| | ACUUGAAAAAGUGGCACCGAGUCGGUGCmUsmUsmUs | |
| | U | |
| ABE_NGC_20 nt_3- | mUsmUsmCsUUACCUGCUUCAGAAUGGUUUUAGAGCU | 1303 |
| 9_008_+_160557382_spCas9 | AGAAAUAGCAAGUUAAAAUAAGGCUAGUCCGUUAUCA | |
| | ACUUGAAAAAGUGGCACCGAGUCGGUGCmUsmUsmUs | |
| | U | |
| CBE_NGC_20 nt_4- | mUsmUsmCsUUACCUGCUUCAGAAUGGUUUUAGAGCU | 1304 |
| 9_009_+_160557382_spCas9 | AGAAAUAGCAAGUUAAAAUAAGGCUAGUCCGUUAUCA | |
| | ACUUGAAAAAGUGGCACCGAGUCGGUGCmUsmUsmUs | |
| | U | |
| ABE_NGC_20 nt_3- | mUsmUsmCsUUACCUUGUUCAAAAAAGUUUUAGAGCU | 1305 |
| 9_008_+_160600909_spCas9 | AGAAAUAGCAAGUUAAAAUAAGGCUAGUCCGUUAUCA | |
| | ACUUGAAAAAGUGGCACCGAGUCGGUGCmUsmUsmUs | |
| | U | |
| CBE_NGC_20 nt_4- | mUsmUsmCsUUACCUUGUUCAAAAAAGUUUUAGAGCU | 1306 |
| 9_009_+_160600909_spCas9 | AGAAAUAGCAAGUUAAAAUAAGGCUAGUCCGUUAUCA | |
| | ACUUGAAAAAGUGGCACCGAGUCGGUGCmUsmUsmUs | |
| | U | |
| CBE_NGC_20 nt_4-9_009_−_ | mUsmUsmGsAACAAGGUAAGAAGUUGGUUUUAGAGCU | 1307 |
| 160600902_spCas9 | AGAAAUAGCAAGUUAAAAUAAGGCUAGUCCGUUAUCA | |
| | ACUUGAAAAAGUGGCACCGAGUCGGUGCmUsmUsmUs | |
| | U | |
| ABE_NGC_20 nt_3-9_008_−_ | mUsmUsmUsCAGCACCAACUGAAAACGUUUUAGAGCU | 1308 |
| 160585188_spCas9 | AGAAAUAGCAAGUUAAAAUAAGGCUAGUCCGUUAUCA | |
| | ACUUGAAAAAGUGGCACCGAGUCGGUGCmUsmUsmUs | |
| | U | |
| ABE_NGC_20 nt_3-9_008_−_ | mUsmUsmUsCAGCACCACCUGAGAAAGUUUUAGAGCU | 1309 |
| 160577278_spCas9 | AGAAAUAGCAAGUUAAAAUAAGGCUAGUCCGUUAUCA | |
| | ACUUGAAAAAGUGGCACCGAGUCGGUGCmUsmUsmUs | |
| | U | |
| ABE_NGG_20 nt_3-9_002_−_ | mUsmUsmUsCUACAGACUGUAUGUUUGUUUUAGAGCU | 1310 |
| 160547923_spCas9 | AGAAAUAGCAAGUUAAAAUAAGGCUAGUCCGUUAUCA | |
| | ACUUGAAAAAGUGGCACCGAGUCGGUGCmUsmUsmUs | |
| | U | |
| ABE_NGC_20 nt_3-9_008_−_ | mUsmUsmUSUAGCAGCACCUGAGCAAGUUUUAGAGCU | 1311 |
| 160650480_spCas9 | AGAAAUAGCAAGUUAAAAUAAGGCUAGUCCGUUAUCA | |
| | ACUUGAAAAAGUGGCACCGAGUCGGUGCmUsmUsmUs | |
| | U | |
| ABE_NGG_20 nt_3-9_002_−_ | mUsmUsmUsUCUACAGACUGUAUGUUGUUUUAGAGCU | 1312 |
| 160547924_spCas9 | AGAAAUAGCAAGUUAAAAUAAGGCUAGUCCGUUAUCA | |
| | ACUUGAAAAAGUGGCACCGAGUCGGUGCmUsmUsmUs | |
| | U | |

| | Alternative | Target | | SEQ |
|---|---|---|---|---|
| Guide | Guide | Site | | ID |
| Name | Name | Name | Guide Polynucleotide Sequence | NO |
| gRNA3423- | gRNA3423 | TSBTx6282 | mAsmAsmAsCGUACUUCUUCAAGCAGGUUUUAGAGC | 1315 |
| 3114 | | | UAGAAAUAGCAAGUUAAAAUAAGGCUAGUCCGUUAU | |
| | | | CAACUUGAAAAAGUGGCACCGAGUCGGUGCmUsmUs | |
| | | | mUsU | |
| gRNA3421- | gRNA3421 | TSBTx6280 | mAsmAsmAsACACCAAGGGCCUGUAUGUUUUAGAGC | 1313 |
| 3112 | | | UAGAAAUAGCAAGUUAAAAUAAGGCUAGUCCGUUAU | |
| | | | CAACUUGAAAAAGUGGCACCGAGUCGGUGCmUsmUs | |
| | | | mUsU | |
| gRNA3422- | gRNA3422 | TSBTx6281 | mAsmAsmAsCACCAAGGGCCUGUAUCGUUUUAGAGC | 1314 |
| 3113 | | | UAGAAAUAGCAAGUUAAAAUAAGGCUAGUCCGUUAU | |
| | | | CAACUUGAAAAAGUGGCACCGAGUCGGUGCmUsmUs | |
| | | | mUsU | |
| gRNA3424- | gRNA3424 | TSBTx6283 | mAsmAsmCsACAGGUACCUUUGGGACGUUUUAGAGC | 1316 |
| 3115 | | | UAGAAAUAGCAAGUUAAAAUAAGGCUAGUCCGUUAU | |
| | | | CAACUUGAAAAAGUGGCACCGAGUCGGUGCmUsmUs | |
| | | | mUsU | |
| gRNA3425- | gRNA3425 | TSBTx6284 | mAsmAsmCsACCAAGGGGCUGCCACAGUUUUAGAGC | 1317 |
| 3116 | | | UAGAAAUAGCAAGUUAAAAUAAGGCUAGUCCGUUAU | |
| | | | CAACUUGAAAAAGUGGCACCGAGUCGGUGCmUsmUs | |
| | | | mUsU | |
| gRNA3426- | gRNA3426 | TSBTx6285 | mAsmAsmGsCCACUGGAAAUUCCAAAGUUUUAGAGC | 1318 |
| 3117 | | | UAGAAAUAGCAAGUUAAAAUAAGGCUAGUCCGUUAU | |
| | | | CAACUUGAAAAAGUGGCACCGAGUCGGUGCmUsmUs | |
| | | | mUsU | |
| gRNA3427- | gRNA3427 | TSBTx6286 | mAsmAsmGsGCAGUCCAUUCUGCAUCGUUUUAGAGC | 1319 |
| 3118 | | | UAGAAAUAGCAAGUUAAAAUAAGGCUAGUCCGUUAU | |
| | | | CAACUUGAAAAAGUGGCACCGAGUCGGUGCmUsmUs | |
| | | | mUSU | |
| gRNA3428- | gRNA3428 | TSBTx6287 | mAsmAsmUsUUCUUACCUUGUUCAGAGUUUUAGAGC | 1320 |
| 3119 | | | UAGAAAUAGCAAGUUAAAAUAAGGCUAGUCCGUUAU | |
| | | | CAACUUGAAAAAGUGGCACCGAGUCGGUGCmUsmUs | |
| | | | mUsU | |
| gRNA3429- | gRNA3429 | TSBTx6288 | mAsmCsmAsCAGGUACCUUUGGGACUGUUUUAGAGC | 1321 |
| 3120 | | | UAGAAAUAGCAAGUUAAAAUAAGGCUAGUCCGUUAU | |
| | | | CAACUUGAAAAAGUGGCACCGAGUCGGUGCmUsmUs | |
| | | | mUSU | |
| gRNA3430- | gRNA3430 | TSBTx6289 | mAsmCsmAsGUCCAGGACUGCUACCAGUUUUAGAGC | 1322 |
| 3121 | | | UAGAAAUAGCAAGUUAAAAUAAGGCUAGUCCGUUAU | |
| | | | CAACUUGAAAAAGUGGCACCGAGUCGGUGCmUsmUs | |
| | | | mUsU | |
| gRNA3431- | gRNA3431 | TSBTx6290 | mAsmCsmGsCGAUGCUCAGACACAGAGUUUUAGAGC | 1323 |
| 3122 | | | UAGAAAUAGCAAGUUAAAAUAAGGCUAGUCCGUUAU | |
| | | | CAACUUGAAAAAGUGGCACCGAGUCGGUGCmUsmUs | |
| | | | mUSU | |
| gRNA3432- | gRNA3432 | TSBTx6291 | mAsmCsmGsUACUUCUUCAAGCAGUGGUUUUAGAGC | 1324 |
| 3123 | | | UAGAAAUAGCAAGUUAAAAUAAGGCUAGUCCGUUAU | |
| | | | CAACUUGAAAAAGUGGCACCGAGUCGGUGCmUsmUs | |
| | | | mUsU | |
| gRNA3433- | gRNA3433 | TSBTx6292 | mAsmGsmCsCCAGCUCCUUGUUAUUGGUUUUAGAGC | 1325 |
| 3124 | | | UAGAAAUAGCAAGUUAAAAUAAGGCUAGUCCGUUAU | |
| | | | CAACUUGAAAAAGUGGCACCGAGUCGGUGCmUsmUs | |
| | | | mUSU | |
| gRNA3434- | gRNA3434 | TSBTx6293 | mAsmGsmGsAUGCUGUGGCACAAGGUGUUUUAGAGC | 1326 |
| 3125 | | | UAGAAAUAGCAAGUUAAAAUAAGGCUAGUCCGUUAU | |
| | | | CAACUUGAAAAAGUGGCACCGAGUCGGUGCmUsmUs | |
| | | | mUSU | |
| gRNA3435- | gRNA3435 | TSBTx6294 | mAsmGsmGsCCUGUAAGGAAAGUAUUGUUUUAGAGC | 1327 |
| 3126 | | | UAGAAAUAGCAAGUUAAAAUAAGGCUAGUCCGUUAU | |
| | | | CAACUUGAAAAAGUGGCACCGAGUCGGUGCmUsmUs | |
| | | | mUsU | |
| gRNA3436- | gRNA3436 | TSBTx6295 | mAsmGsmUsACUCCCACCUCACACACGUUUUAGAGC | 1328 |
| 3127 | | | UAGAAAUAGCAAGUUAAAAUAAGGCUAGUCCGUUAU | |
| | | | CAACUUGAAAAAGUGGCACCGAGUCGGUGCmUsmUs | |
| | | | mUsU | |
| gRNA3437- | gRNA3437 | TSBTx6296 | mAsmGsmUsGCUGAAAUUAAAACAGAGUUUUAGAGC | 1329 |
| 3128 | | | UAGAAAUAGCAAGUUAAAAUAAGGCUAGUCCGUUAU | |
| | | | CAACUUGAAAAAGUGGCACCGAGUCGGUGCmUsmUs | |
| | | | mUsU | |
| gRNA3438- | gRNA3438 | TSBTx6297 | mAsmUsmGsUCAAUCUUGGUCAUCCAGUUUUAGAGC | 1330 |
| 3129 | | | UAGAAAUAGCAAGUUAAAAUAAGGCUAGUCCGUUAU | |
| | | | CAACUUGAAAAAGUGGCACCGAGUCGGUGCmUsmUs | |
| | | | mUsU | |
| gRNA3439- | gRNA3439 | TSBTx6298 | mAsmUsmUsAUGGACAGAGUUACCGAGUUUUAGAGC | 1331 |
| 3130 | | | UAGAAAUAGCAAGUUAAAAUAAGGCUAGUCCGUUAU | |
| | | | CAACUUGAAAAAGUGGCACCGAGUCGGUGCmUsmUs | |
| | | | mUSU | |
| gRNA3440- | gRNA3440 | TSBTx6299 | mCsmAsmCsACAAGCAGAUAUUGCCUGUUUUAGAGC | 1332 |
| 3131 | | | UAGAAAUAGCAAGUUAAAAUAAGGCUAGUCCGUUAU | |
| | | | CAACUUGAAAAAGUGGCACCGAGUCGGUGCmUsmUs | |
| | | | mUsU | |
| gRNA3441- | gRNA3441 | TSBTx6300 | mCsmAsmCsCAGCAUAGUCGGACCCCGUUUUAGAGC | 1333 |
| 3132 | | | UAGAAAUAGCAAGUUAAAAUAAGGCUAGUCCGUUAU | |
| | | | CAACUUGAAAAAGUGGCACCGAGUCGGUGCmUsmUs | |
| | | | mUSU | |
| gRNA3442- | gRNA3442 | TSBTx6301 | mCsmAsmGsUACUCCCACCUCACACAGUUUUAGAGC | 1334 |
| 3133 | | | UAGAAAUAGCAAGUUAAAAUAAGGCUAGUCCGUUAU | |
| | | | CAACUUGAAAAAGUGGCACCGAGUCGGUGCmUsmUs | |
| | | | mUsU | |
| gRNA3443- | gRNA3443 | TSBTx6302 | mCsmAsmUsCAACAUAAUAGGACCACGUUUUAGAGC | 1335 |
| 3134 | | | UAGAAAUAGCAAGUUAAAAUAAGGCUAGUCCGUUAU | |
| | | | CAACUUGAAAAAGUGGCACCGAGUCGGUGCmUsmUs | |
| | | | mUsU | |
| gRNA3444- | gRNA3444 | TSBTx6303 | mCsmAsmUsCCAGGUUCCAAGCCUAGGUUUUAGAGC | 1336 |
| 3135 | | | UAGAAAUAGCAAGUUAAAAUAAGGCUAGUCCGUUAU | |
| | | | CAACUUGAAAAAGUGGCACCGAGUCGGUGCmUsmUs | |
| | | | mUSU | |
| gRNA3445- | gRNA3445 | TSBTx6304 | mCsmCsmAsAACCUAGAAAGAAAACAGUUUUAGAGC | 1337 |
| 3136 | | | UAGAAAUAGCAAGUUAAAAUAAGGCUAGUCCGUUAU | |
| | | | CAACUUGAAAAAGUGGCACCGAGUCGGUGCmUsmUs | |
| | | | mUsU | |
| gRNA3446- | gRNA3446 | TSBTx6305 | mCsmCsmUsGCCCAUUUAUUUGUCCCGUUUUAGAGC | 1338 |
| 3137 | | | UAGAAAUAGCAAGUUAAAAUAAGGCUAGUCCGUUAU | |
| | | | CAACUUGAAAAAGUGGCACCGAGUCGGUGCmUsmUs | |
| | | | mUsU | |
| gRNA3447- | gRNA3447 | TSBTx6306 | mCsmGsmAsUGCCAAUGUGGUGUCAUGUUUUAGAGC | 1339 |
| 3138 | | | UAGAAAUAGCAAGUUAAAAUAAGGCUAGUCCGUUAU | |
| | | | CAACUUGAAAAAGUGGCACCGAGUCGGUGCmUsmUs | |
| | | | mUsU | |
| gRNA3448- | gRNA3448 | TSBTx6307 | mCsmGsmGsCAGUGCUACCAUGGUAAGUUUUAGAGC | 1340 |
| 3139 | | | UAGAAAUAGCAAGUUAAAAUAAGGCUAGUCCGUUAU | |
| | | | CAACUUGAAAAAGUGGCACCGAGUCGGUGCmUsmUs | |
| | | | mUsU | |
| gRNA3449- | gRNA3449 | TSBTx6308 | mCsmUsmCsCCACCUCACACACGGAUGUUUUAGAGC | 1341 |
| 3140 | | | UAGAAAUAGCAAGUUAAAAUAAGGCUAGUCCGUUAU | |
| | | | CAACUUGAAAAAGUGGCACCGAGUCGGUGCmUsmUs | |
| | | | mUsU | |
| gRNA3450- | gRNA3450 | TSBTx6309 | mCsmUsmGsACACAAUGCCUGGUGACGUUUUAGAGC | 1342 |
| 3141 | | | UAGAAAUAGCAAGUUAAAAUAAGGCUAGUCCGUUAU | |
| | | | CAACUUGAAAAAGUGGCACCGAGUCGGUGCmUsmUs | |
| | | | mUSU | |
| gRNA3451- | gRNA3451 | TSBTx6310 | mCsmUsmGsACACAAUGCUCAGAAACGUUUUAGAGC | 1343 |
| 3142 | | | UAGAAAUAGCAAGUUAAAAUAAGGCUAGUCCGUUAU | |
| | | | CAACUUGAAAAAGUGGCACCGAGUCGGUGCmUsmUs | |
| | | | mUsU | |
| gRNA3452- | gRNA3452 | TSBTx6311 | mCsmUsmGsACACGAUGCUCAGAUGCGUUUUAGAGC | 1344 |
| 3143 | | | UAGAAAUAGCAAGUUAAAAUAAGGCUAGUCCGUUAU | |
| | | | CAACUUGAAAAAGUGGCACCGAGUCGGUGCmUsmUs | |
| | | | mUsU | |
| gRNA3453- | gRNA3453 | TSBTx6312 | mCsmUsmGsACGCAAUGUCCAGUGAUGUUUUAGAGC | 1345 |
| 3144 | | | UAGAAAUAGCAAGUUAAAAUAAGGCUAGUCCGUUAU | |
| | | | CAACUUGAAAAAGUGGCACCGAGUCGGUGCmUsmUs | |
| | | | mUsU | |
| gRNA3454- | gRNA3454 | TSBTx6313 | mCsmUsmGsACGCGAUGCUCAGACACGUUUUAGAGC | 1346 |
| 3145 | | | UAGAAAUAGCAAGUUAAAAUAAGGCUAGUCCGUUAU | |
| | | | CAACUUGAAAAAGUGGCACCGAGUCGGUGCmUsmUs | |
| | | | mUSU | |
| gRNA3455- | gRNA3455 | TSBTx6314 | mCsmUsmGsCCCAUUUAUUUGUCCCUGUUUUAGAGC | 1347 |
| 3146 | | | UAGAAAUAGCAAGUUAAAAUAAGGCUAGUCCGUUAU | |
| | | | CAACUUGAAAAAGUGGCACCGAGUCGGUGCmUsmUs | |
| | | | mUsU | |
| gRNA3456- | gRNA3456 | TSBTx6315 | mCsmUsmGsCCGAAAUCCAGAUCCUGGUUUUAGAGC | 1348 |
| 3147 | | | UAGAAAUAGCAAGUUAAAAUAAGGCUAGUCCGUUAU | |
| | | | CAACUUGAAAAAGUGGCACCGAGUCGGUGCmUsmUs | |
| | | | mUsU | |
| gRNA3457- | gRNA3457 | TSBTx6316 | mCsmUsmGsCUACCGAGGUGAUGGACGUUUUAGAGC | 1349 |
| 3148 | | | UAGAAAUAGCAAGUUAAAAUAAGGCUAGUCCGUUAU | |
| | | | CAACUUGAAAAAGUGGCACCGAGUCGGUGCmUsmUs | |
| | | | mUSU | |
| gRNA3458- | gRNA3458 | TSBTx6317 | mCsmUsmGsGGGUCCAGGACUGCUACGUUUUAGAGC | 1350 |
| 3149 | | | UAGAAAUAGCAAGUUAAAAUAAGGCUAGUCCGUUAU | |
| | | | CAACUUGAAAAAGUGGCACCGAGUCGGUGCmUsmUs | |
| | | | mUSU | |
| gRNA3459- | gRNA3459 | TSBTx6318 | mCsmUsmGsUCAAUCUUGGUCAUCUAGUUUUAGAGC | 1351 |
| 3150 | | | UAGAAAUAGCAAGUUAAAAUAAGGCUAGUCCGUUAU | |
| | | | CAACUUGAAAAAGUGGCACCGAGUCGGUGCmUsmUs | |
| | | | mUsU | |
| gRNA3460- | gRNA3460 | TSBTx6319 | mCsmUsmGsUCACCCUAAACAGAGGUGUUUUAGAGC | 1352 |
| 3151 | | | UAGAAAUAGCAAGUUAAAAUAAGGCUAGUCCGUUAU | |
| | | | CAACUUGAAAAAGUGGCACCGAGUCGGUGCmUsmUs | |
| | | | mUsU | |
| gRNA3461- | gRNA3461 | TSBTx6320 | mCsmUsmGsUUUAGGGUGACAGUGGAGUUUUAGAGC | 1353 |
| 3152 | | | UAGAAAUAGCAAGUUAAAAUAAGGCUAGUCCGUUAU | |
| | | | CAACUUGAAAAAGUGGCACCGAGUCGGUGCmUsmUs | |
| | | | mUsU | |
| gRNA3462- | gRNA3462 | TSBTx6321 | mGsmAsmAsAUGGACAGAGUUAUCAAGUUUUAGAGC | 1354 |
| 3153 | | | UAGAAAUAGCAAGUUAAAAUAAGGCUAGUCCGUUAU | |
| | | | CAACUUGAAAAAGUGGCACCGAGUCGGUGCmUsmUs | |
| | | | mUsU | |
| gRNA3463- | gRNA3463 | TSBTx6322 | mGsmAsmAsCAAGGUAAGAAGUCUCUGUUUUAGAGC | 1355 |
| 3154 | | | UAGAAAUAGCAAGUUAAAAUAAGGCUAGUCCGUUAU | |
| | | | CAACUUGAAAAAGUGGCACCGAGUCGGUGCmUsmUs | |
| | | | mUSU | |
| gRNA3464- | gRNA3464 | TSBTx6323 | mGsmAsmAsGCCCAGCUCCUUGUUAUGUUUUAGAGC | 1356 |
| 3155 | | | UAGAAAUAGCAAGUUAAAAUAAGGCUAGUCCGUUAU | |
| | | | CAACUUGAAAAAGUGGCACCGAGUCGGUGCmUsmUs | |
| | | | mUsU | |
| gRNA3465- | gRNA3465 | TSBTx6324 | mGsmAsmCsUUCCUACCUUCUUCAGAGUUUUAGAGC | 1357 |
| 3156 | | | UAGAAAUAGCAAGUUAAAAUAAGGCUAGUCCGUUAU | |
| | | | CAACUUGAAAAAGUGGCACCGAGUCGGUGCmUsmUs | |
| | | | mUsU | |
| gRNA3466- | gRNA3466 | TSBTx6325 | mGsmAsmCsUUCUUACCUUGUUCAGAGUUUUAGAGC | 1358 |
| 3157 | | | UAGAAAUAGCAAGUUAAAAUAAGGCUAGUCCGUUAU | |
| | | | CAACUUGAAAAAGUGGCACCGAGUCGGUGCmUsmUs | |
| | | | mUsU | |
| gRNA3467- | gRNA3467 | TSBTx6326 | mGsmAsmGsCAAAGCCAUGUGGUCCAGUUUUAGAGC | 1359 |
| 3158 | | | UAGAAAUAGCAAGUUAAAAUAAGGCUAGUCCGUUAU | |
| | | | CAACUUGAAAAAGUGGCACCGAGUCGGUGCmUsmUs | |
| | | | mUsU | |
| gRNA3468- | gRNA3468 | TSBTx6327 | mGsmAsmGsCAAAGCCCCACAGUCCAGUUUUAGAGC | 1360 |
| 3159 | | | UAGAAAUAGCAAGUUAAAAUAAGGCUAGUCCGUUAU | |
| | | | CAACUUGAAAAAGUGGCACCGAGUCGGUGCmUsmUs | |
| | | | mUSU | |
| gRNA3469- | gRNA3469 | TSBTx6328 | mGsmAsmGsCAAAGCCCCGGGGUCCAGUUUUAGAGC | 1361 |
| 3160 | | | UAGAAAUAGCAAGUUAAAAUAAGGCUAGUCCGUUAU | |
| | | | CAACUUGAAAAAGUGGCACCGAGUCGGUGCmUsmUs | |
| | | | mUsU | |
| gRNA3470- | gRNA3470 | TSBTx6329 | mGsmAsmGsGAUGCUGUGGCACAAGGGUUUUAGAGC | 1362 |
| 3161 | | | UAGAAAUAGCAAGUUAAAAUAAGGCUAGUCCGUUAU | |
| | | | CAACUUGAAAAAGUGGCACCGAGUCGGUGCmUsmUs | |
| | | | mUsU | |
| gRNA3471- | gRNA3471 | TSBTx6330 | mGsmCsmCsACAGCAUCCUCUUCAUUGUUUUAGAGC | 1363 |
| 3162 | | | UAGAAAUAGCAAGUUAAAAUAAGGCUAGUCCGUUAU | |
| | | | CAACUUGAAAAAGUGGCACCGAGUCGGUGCmUsmUs | |
| | | | mUsU | |
| gRNA3472- | gRNA3472 | TSBTx6331 | mGsmCsmUsCCUUACCUUGUUCAGAAGUUUUAGAGC | 1364 |
| 3163 | | | UAGAAAUAGCAAGUUAAAAUAAGGCUAGUCCGUUAU | |
| | | | CAACUUGAAAAAGUGGCACCGAGUCGGUGCmUsmUs | |
| | | | mUsU | |
| gRNA3473- | gRNA3473 | TSBTx6332 | mGsmCsmUsGCUAAAAUUAAAACAGAGUUUUAGAGC | 1365 |
| 3164 | | | UAGAAAUAGCAAGUUAAAAUAAGGCUAGUCCGUUAU | |
| | | | CAACUUGAAAAAGUGGCACCGAGUCGGUGCmUsmUs | |
| | | | mUsU | |
| gRNA3474- | gRNA3474 | TSBTx6333 | mGsmCsmUsUCUUACCUUCUUCAGAAGUUUUAGAGC | 1366 |
| 3165 | | | UAGAAAUAGCAAGUUAAAAUAAGGCUAGUCCGUUAU | |
| | | | CAACUUGAAAAAGUGGCACCGAGUCGGUGCmUsmUs | |
| | | | mUsU | |
| gRNA3475- | gRNA3475 | TSBTx6334 | mGsmGsmAsGCAAAGCCCCACAGUCCGUUUUAGAGC | 1367 |
| 3166 | | | UAGAAAUAGCAAGUUAAAAUAAGGCUAGUCCGUUAU | |
| | | | CAACUUGAAAAAGUGGCACCGAGUCGGUGCmUsmUs | |
| | | | mUsU | |
| gRNA3476- | gRNA3476 | TSBTx6335 | mGsmGsmAsGCAAAGCCCCGGGGUCCGUUUUAGAGC | 1368 |
| 3167 | | | UAGAAAUAGCAAGUUAAAAUAAGGCUAGUCCGUUAU | |
| | | | CAACUUGAAAAAGUGGCACCGAGUCGGUGCmUsmUs | |
| | | | mUSU | |
| gRNA3477- | gRNA3477 | TSBTx6336 | mGsmGsmAsUGCUGUGGCACAAGGUGGUUUUAGAGC | 1369 |
| 3168 | | | UAGAAAUAGCAAGUUAAAAUAAGGCUAGUCCGUUAU | |
| | | | CAACUUGAAAAAGUGGCACCGAGUCGGUGCmUsmUs | |
| | | | mUSU | |
| gRNA3478- | gRNA3478 | TSBTx6337 | mGsmGsmCsAGUCCAUUCUGCAUCUGGUUUUAGAGC | 1370 |
| 3169 | | | UAGAAAUAGCAAGUUAAAAUAAGGCUAGUCCGUUAU | |
| | | | CAACUUGAAAAAGUGGCACCGAGUCGGUGCmUsmUs | |
| | | | mUsU | |
| gRNA3479- | gRNA3479 | TSBTx6338 | mGsmGsmCsUCCUUACCUUGUUCAGAGUUUUAGAGC | 1371 |
| 3170 | | | UAGAAAUAGCAAGUUAAAAUAAGGCUAGUCCGUUAU | |
| | | | CAACUUGAAAAAGUGGCACCGAGUCGGUGCmUsmUs | |
| | | | mUSU | |
| gRNA3480- | gRNA3480 | TSBTx6339 | mGsmGsmCsUUCUUACCUUCUUCAGAGUUUUAGAGC | 1372 |
| 3171 | | | UAGAAAUAGCAAGUUAAAAUAAGGCUAGUCCGUUAU | |
| | | | CAACUUGAAAAAGUGGCACCGAGUCGGUGCmUsmUs | |
| | | | mUsU | |
| gRNA3481- | gRNA3481 | TSBTx6340 | mGsmGsmGsGUCCAGGACUGCUACCGGUUUUAGAGC | 1373 |
| 3172 | | | UAGAAAUAGCAAGUUAAAAUAAGGCUAGUCCGUUAU | |
| | | | CAACUUGAAAAAGUGGCACCGAGUCGGUGCmUsmUs | |
| | | | mUSU | |
| gRNA3482- | gRNA3482 | TSBTx6341 | mGsmGsmGsUGCAGGAGUGCUACCACGUUUUAGAGC | 1374 |
| 3173 | | | UAGAAAUAGCAAGUUAAAAUAAGGCUAGUCCGUUAU | |
| | | | CAACUUGAAAAAGUGGCACCGAGUCGGUGCmUsmUs | |
| | | | mUSU | |
| gRNA3483- | gRNA3483 | TSBTx6342 | mGsmGsmUsGCUGAAAUGAAAAGAAAGUUUUAGAGC | 1375 |
| 3174 | | | UAGAAAUAGCAAGUUAAAAUAAGGCUAGUCCGUUAU | |
| | | | CAACUUGAAAAAGUGGCACCGAGUCGGUGCmUsmUs | |
| | | | mUsU | |
| gRNA3484- | gRNA3484 | TSBTx6343 | mGsmGsmUsGCUGCUAAAAUUAAAACGUUUUAGAGC | 1376 |
| 3175 | | | UAGAAAUAGCAAGUUAAAAUAAGGCUAGUCCGUUAU | |
| | | | CAACUUGAAAAAGUGGCACCGAGUCGGUGCmUsmUs | |
| | | | mUsU | |
| gRNA3485- | gRNA3485 | TSBTx6344 | mGsmUsmCsACCCUAAACAGAGGUAGGUUUUAGAGC | 1377 |
| 3176 | | | UAGAAAUAGCAAGUUAAAAUAAGGCUAGUCCGUUAU | |
| | | | CAACUUGAAAAAGUGGCACCGAGUCGGUGCmUsmUs | |
| | | | mUSU | |
| gRNA3486- | gRNA3486 | TSBTx6345 | mGsmUsmCsAGUGCUGAAAUUAAAACGUUUUAGAGC | 1378 |
| 3177 | | | UAGAAAUAGCAAGUUAAAAUAAGGCUAGUCCGUUAU | |
| | | | CAACUUGAAAAAGUGGCACCGAGUCGGUGCmUsmUs | |
| | | | mUSU | |
| gRNA3487- | gRNA3487 | TSBTx6346 | mGsmUsmCsAUCCAGGUUCCAAGCCUGUUUUAGAGC | 1379 |
| 3178 | | | UAGAAAUAGCAAGUUAAAAUAAGGCUAGUCCGUUAU | |
| | | | CAACUUGAAAAAGUGGCACCGAGUCGGUGCmUsmUs | |
| | | | mUsU | |
| gRNA3488- | gRNA3488 | TSBTx6347 | mGsmUsmCsCAGGACUGCUACCGAGGGUUUUAGAGC | 1380 |
| 3179 | | | UAGAAAUAGCAAGUUAAAAUAAGGCUAGUCCGUUAU | |
| | | | CAACUUGAAAAAGUGGCACCGAGUCGGUGCmUsmUs | |
| | | | mUSU | |
| gRNA3489- | gRNA3489 | TSBTx6348 | mUsmAsmAsCACCAAGGACUAAUCUCGUUUUAGAGC | 1381 |
| 3180 | | | UAGAAAUAGCAAGUUAAAAUAAGGCUAGUCCGUUAU | |
| | | | CAACUUGAAAAAGUGGCACCGAGUCGGUGCmUsmUs | |
| | | | mUsU | |
| gRNA3490- | gRNA3490 | TSBTx6349 | mUsmAsmAsCACCAAGGGGCUGCCACGUUUUAGAGC | 1382 |
| 3181 | | | UAGAAAUAGCAAGUUAAAAUAAGGCUAGUCCGUUAU | |
| | | | CAACUUGAAAAAGUGGCACCGAGUCGGUGCmUsmUs | |
| | | | mUsU | |
| gRNA3491- | gRNA3491 | TSBTx6350 | mUsmAsmAsCACCAGGGUUGUUUCCCGUUUUAGAGC | 1383 |
| 3182 | | | UAGAAAUAGCAAGUUAAAAUAAGGCUAGUCCGUUAU | |
| | | | CAACUUGAAAAAGUGGCACCGAGUCGGUGCmUsmUs | |
| | | | mUsU | |
| gRNA3492- | gRNA3492 | TSBTx6351 | mUsmAsmCsAGGCCUGCCGUCAUCACGUUUUAGAGC | 1384 |
| 3183 | | | UAGAAAUAGCAAGUUAAAAUAAGGCUAGUCCGUUAU | |
| | | | CAACUUGAAAAAGUGGCACCGAGUCGGUGCmUsmUs | |
| | | | mUsU | |
| gRNA3493- | gRNA3493 | TSBTx6352 | mUsmCsmAsCCCUAAACAGAGGUAGGGUUUUAGAGC | 1385 |
| 3184 | | | UAGAAAUAGCAAGUUAAAAUAAGGCUAGUCCGUUAU | |
| | | | CAACUUGAAAAAGUGGCACCGAGUCGGUGCmUsmUs | |
| | | | mUsU | |
| gRNA3494- | gRNA3494 | TSBTx6353 | mUsmCsmAsUCCAGGUUCCAAGCCUAGUUUUAGAGC | 1386 |
| 3185 | | | UAGAAAUAGCAAGUUAAAAUAAGGCUAGUCCGUUAU | |
| | | | CAACUUGAAAAAGUGGCACCGAGUCGGUGCmUsmUs | |
| | | | mUSU | |
| gRNA3495- | gRNA3495 | TSBTx6354 | mUsmGsmAsACAAGGUAAGAAAUUUGGUUUUAGAGC | 1387 |
| 3186 | | | UAGAAAUAGCAAGUUAAAAUAAGGCUAGUCCGUUAU | |
| | | | CAACUUGAAAAAGUGGCACCGAGUCGGUGCmUsmUs | |
| | | | mUsU | |
| gRNA3496- | gRNA3496 | TSBTx6355 | mUsmGsmAsACAAGGUAAGAAGUCUCGUUUUAGAGC | 1388 |
| 3187 | | | UAGAAAUAGCAAGUUAAAAUAAGGCUAGUCCGUUAU | |
| | | | CAACUUGAAAAAGUGGCACCGAGUCGGUGCmUsmUs | |
| | | | mUsU | |
| gRNA3497- | gRNA3497 | TSBTx6356 | mUsmGsmAsACAAGGUAAGGAGCCUGGUUUUAGAGC | 1389 |
| 3188 | | | UAGAAAUAGCAAGUUAAAAUAAGGCUAGUCCGUUAU | |
| | | | CAACUUGAAAAAGUGGCACCGAGUCGGUGCmUsmUs | |
| | | | mUSU | |
| gRNA3498- | gRNA3498 | TSBTx6357 | mUsmGsmAsGCAAAGCCAUGUGGUCCGUUUUAGAGC | 1390 |
| 3189 | | | UAGAAAUAGCAAGUUAAAAUAAGGCUAGUCCGUUAU | |
| | | | CAACUUGAAAAAGUGGCACCGAGUCGGUGCmUsmUs | |
| | | | mUsU | |
| gRNA3499- | gRNA3499 | TSBTx6358 | mUsmGsmCsCGAAAUCCAGAUCCUGUGUUUUAGAGC | 1391 |
| 3190 | | | UAGAAAUAGCAAGUUAAAAUAAGGCUAGUCCGUUAU | |
| | | | CAACUUGAAAAAGUGGCACCGAGUCGGUGCmUsmUs | |
| | | | mUsU | |
| gRNA3500- | gRNA3500 | TSBTx6359 | mUsmGsmUsCACCCUAAACAGAGGUAGUUUUAGAGC | 1392 |
| 3191 | | | UAGAAAUAGCAAGUUAAAAUAAGGCUAGUCCGUUAU | |
| | | | CAACUUGAAAAAGUGGCACCGAGUCGGUGCmUsmUs | |
| | | | mUsU | |
| gRNA3501- | gRNA3501 | TSBTx6360 | mUsmGsmUsUUAGGGUGACAGUGGAGGUUUUAGAGC | 1393 |
| 3192 | | | UAGAAAUAGCAAGUUAAAAUAAGGCUAGUCCGUUAU | |
| | | | CAACUUGAAAAAGUGGCACCGAGUCGGUGCmUsmUs | |
| | | | mUsU | |
| gRNA3502- | gRNA3502 | TSBTx6361 | mUsmUsmAsAUUUCAGCACUGACUGAGUUUUAGAGC | 1394 |
| 3193 | | | UAGAAAUAGCAAGUUAAAAUAAGGCUAGUCCGUUAU | |
| | | | CAACUUGAAAAAGUGGCACCGAGUCGGUGCmUsmUs | |
| | | | mUSU | |
| gRNA3503- | gRNA3503 | TSBTx6362 | mUsmUsmCsCUACCUUCUUCAGAAGAGUUUUAGAGC | 1395 |
| 3194 | | | UAGAAAUAGCAAGUUAAAAUAAGGCUAGUCCGUUAU | |
| | | | CAACUUGAAAAAGUGGCACCGAGUCGGUGCmUsmUs | |
| | | | mUsU | |
| gRNA3504- | gRNA3504 | TSBTx6363 | mUsmUsmCsUACAGACUGUAUGUUUGGUUUUAGAGC | 1396 |
| 3195 | | | UAGAAAUAGCAAGUUAAAAUAAGGCUAGUCCGUUAU | |
| | | | CAACUUGAAAAAGUGGCACCGAGUCGGUGCmUsmUs | |
| | | | mUSU | |
| gRNA3505- | gRNA3505 | TSBTx6364 | mUsmUsmCsUUACCUGCUUCAGAAUGGUUUUAGAGC | 1397 |
| 3196 | | | UAGAAAUAGCAAGUUAAAAUAAGGCUAGUCCGUUAU | |
| | | | CAACUUGAAAAAGUGGCACCGAGUCGGUGCmUsmUs | |
| | | | mUsU | |
| gRNA3506- | gRNA3506 | TSBTx6365 | mUsmUsmCsUUACCUUGUUCAAAAAAGUUUUAGAGC | 1398 |
| 3197 | | | UAGAAAUAGCAAGUUAAAAUAAGGCUAGUCCGUUAU | |
| | | | CAACUUGAAAAAGUGGCACCGAGUCGGUGCmUsmUs | |
| | | | mUSU | |
| gRNA3507- | gRNA3507 | TSBTx6366 | mUsmUsmGsAACAAGGUAAGAAGUUGGUUUUAGAGC | 1399 |
| 3198 | | | UAGAAAUAGCAAGUUAAAAUAAGGCUAGUCCGUUAU | |
| | | | CAACUUGAAAAAGUGGCACCGAGUCGGUGCmUsmUs | |
| | | | mUsU | |
| gRNA3508- | gRNA3508 | TSBTx6367 | mUsmUsmUsCAGCACCAACUGAAAACGUUUUAGAGC | 1400 |
| 3199 | | | UAGAAAUAGCAAGUUAAAAUAAGGCUAGUCCGUUAU | |
| | | | CAACUUGAAAAAGUGGCACCGAGUCGGUGCmUsmUs | |
| | | | mUsU | |
| gRNA3509- | gRNA3509 | TSBTx6368 | mUsmUsmUsCAGCACCACCUGAGAAAGUUUUAGAGC | 1401 |
| 3200 | | | UAGAAAUAGCAAGUUAAAAUAAGGCUAGUCCGUUAU | |
| | | | CAACUUGAAAAAGUGGCACCGAGUCGGUGCmUsmUs | |
| | | | mUSU | |
| gRNA3510- | gRNA3510 | TSBTx6369 | mUsmUsmUsCUACAGACUGUAUGUUUGUUUUAGAGC | 1402 |
| 3201 | | | UAGAAAUAGCAAGUUAAAAUAAGGCUAGUCCGUUAU | |
| | | | CAACUUGAAAAAGUGGCACCGAGUCGGUGCmUsmUs | |
| | | | mUsU | |
| gRNA3511- | gRNA3511 | TSBTx6370 | mUsmUsmUSUAGCAGCACCUGAGCAAGUUUUAGAGC | 1403 |
| 3202 | | | UAGAAAUAGCAAGUUAAAAUAAGGCUAGUCCGUUAU | |
| | | | CAACUUGAAAAAGUGGCACCGAGUCGGUGCmUsmUs | |
| | | | mUsU | |
| gRNA3512- | gRNA3512 | TSBTx6371 | mUsmUsmUsUCUACAGACUGUAUGUUGUUUUAGAGC | 1404 |
| 3203 | | | UAGAAAUAGCAAGUUAAAAUAAGGCUAGUCCGUUAU | |
| | | | CAACUUGAAAAAGUGGCACCGAGUCGGUGCmUsmUs | |
| | | | mUsU | |
| sgRNA_088- | sgRNA_088 | TSBTx904 | mCsmAsmGsGAUCCGCACAGACUCCAGUUUUAGAGC | 1405 |
| 3329 | | | UAGAAAUAGCAAGUUAAAAUAAGGCUAGUCCGUUAU | |
| | | | CAACUUGAAAAAGUGGCACCGAGUCGGUGCmUsmUs | |
| | | | mUSU | |

TABLE 1B-2
Exemplary spacer sequences and their corresponding target sequences for use
in targeting a base editor to disrupt a splice site or introduce a stop codon in an LPA
polynucleotide.

| | Description of | Base | | PAM | |
|---|---|---|---|---|---|
| | the Target | Editor | | Sequence | PAM |
| Guide Name | Alteration | Name | napDNAbp | Family | Sequence |
| ABE_NGA_20 nt_3- | Splice Site | spCas9 | spCas9 | NGA | TGA |
| 9_005_+_160541098_ | Disruption | VRQR | | | |
| spCas9 | | ABE | | | |
| CBE_NGA_20 nt_4- | Splice Site | spCas9 | spCas9 | NGA | TGA |
| 9_006_+_160541098_ | Disruption | VRQR | | | |
| spCas9 | | CBE | | | |
| CBE_NGG_20 nt_4- | Introduction of a | spCas9 | spCas9 | NGG | CGG |
| 9_003_+_160548601_ | Stop Codon | CBE | | | |
| spCas9 | | | | | |
| CBE_NGC_20 nt_4- | Introduction of a | spCas9 | spCas9 | NGC | GGC |
| 9_009_+_160548602_ | Stop Codon | NGC CBE | | | |
| spCas9 | | | | | |
| ABE_NGG_20 nt_3-9_002_−_ | Splice Site | spCas9 | spCas9 | NGG | TGG |
| 160532633_spCas9 | Disruption | ABE | | | |
| CBE_NGA_20 nt_4- | Introduction of a | spCas9 | spCas9 | NGA | GGA |
| 9_006_+_160601042_ | Stop Codon | VRQR | | | |
| spCas9 | | CBE | | | |
| CBE_NGA_20 nt_4- | Splice Site | spCas9 | spCas9 | NGA | AGA |
| 9_006_+_160601092_ | Disruption | VRQR | | | |
| spCas9 | | CBE | | | |
| CBE_NGA_20 nt_4- | Introduction of a | spCas9 | spCas9 | NGA | TGA |
| 9_006_+_160600969_ | Stop Codon | VRQR | | | |
| spCas9 | | CBE | | | |
| ABE_NGG_20 nt_3- | Splice Site | spCas9 | spCas9 | NGG | AGG |
| 9_002_+_160578512_ | Disruption | ABE | | | |
| spCas9 | | | | | |
| ABE_NGC_20 nt_3-9_008_−_ | Splice Site | spCas9 | spCas9 | NGC | GGC |
| 160532632_spCas9 | Disruption | NGC | | | |
| | | ABE | | | |
| CBE_NGG_20 nt_4-9_003_−_ | Introduction of a | spCas9 | spCas9 | NGG | TGG |
| 160589669_spCas9 | Stop Codon | CBE | | | |
| CBE_NGG_20 nt_4-9_003_−_ | Introduction of a | spCas9 | spCas9 | NGG | AGG |
| 160548539_spCas9 | Stop Codon | CBE | | | |
| ABE_NGC_20 nt_3- | Splice Site | spCas9 | spCas9 | NGC | AGC |
| 9_008_+_160541100_ | Disruption | NGC | | | |
| spCas9 | | ABE | | | |
| CBE_NGC_20 nt_4- | Splice Site | spCas9 | spCas9 | NGC | AGC |
| 9_009_+_160541100_ | Disruption | NGC CBE | | | |
| spCas9 | | | | | |
| CBE_NGA_20 nt_4-9_006_−_ | Introduction of a | spCas9 | spCas9 | NGA | AGA |
| 160532598_spCas9 | Stop Codon | VRQR | | | |
| | | CBE | | | |
| CBE_NGG_20 nt_4- | Splice Site | spCas9 | spCas9 | NGG | GGG |
| 9_003_+_160542802_ | Disruption | CBE | | | |
| spCas9 | | | | | |
| CBE_NGC_20 nt_4- | Splice Site | spCas9 | spCas9 | NGC | AGC |
| 9_009_+_160537957_ | Disruption | NGC CBE | | | |
| spCas9 | | | | | |
| CBE_NGA_20 nt_4- | Introduction of a | spCas9 | spCas9 | NGA | GGA |
| 9_006_+_160557482_ | Stop Codon | VRQR | | | |
| spCas9 | | CBE | | | |
| CBE_NGA_20 nt_4- | Splice Site | spCas9 | spCas9 | NGA | AGA |
| 9_006_+_160599655_ | Disruption | VRQR | | | |
| spCas9 | | CBE | | | |
| CBE_NGA_20 nt_4-9_006_−_ | Introduction of a | spCas9 | spCas9 | NGA | TGA |
| 160556067_spCas9 | Stop Codon | VRQR | | | |
| | | CBE | | | |
| CBE_NGC_20 nt_4-9_009_−_ | Introduction of a | spCas9 | spCas9 | NGC | GGC |
| 160599594_spCas9 | Stop Codon | NGC CBE | | | |
| CBE_NGC_20 nt_4-9_009_−_ | Introduction of a | spCas9 | spCas9 | NGC | TGC |
| 160540055_spCas9 | Stop Codon | NGC CBE | | | |
| CBE_NGA_20 nt_4-9_006_−_ | Introduction of a | spCas9 | spCas9 | NGA | AGA |
| 160599514_spCas9 | Stop Codon | VRQR | | | |
| | | CBE | | | |
| CBE_NGG_20 nt_4- | Introduction of a | spCas9 | spCas9 | NGG | CGG |
| 9_003_+_160557481_ | Stop Codon | CBE | | | |
| spCas9 | | | | | |
| CBE_NGA_20 nt_4-9_006_−_ | Introduction of a | spCas9 | spCas9 | NGA | AGA |
| 160650352_spCas9 | Stop Codon | VRQR | | | |
| | | CBE | | | |
| CBE_NGC_20 nt_4-9_009_−_ | Introduction of a | spCas9 | spCas9 | NGC | GGC |
| 160548492_spCas9 | Stop Codon | NGC CBE | | | |
| CBE_NGC_20 nt_4- | Splice Site | spCas9 | spCas9 | NGC | TGC |
| 9_009_+_160541175_ | Disruption | NGC CBE | | | |
| spCas9 | | | | | |
| CBE_NGG_20 nt_4- | Introduction of a | spCas9 | spCas9 | NGG | TGG |
| 9_003_+_160547801_ | Stop Codon | CBE | | | |
| spCas9 | | | | | |
| CBE_NGA_20 nt_4- | Introduction of a | spCas9 | spCas9 | NGA | AGA |
| 9_006_+_160585072_ | Stop Codon | VRQR | | | |
| spCas9 | | CBE | | | |
| CBE_NGG_20 nt_4-9_003_−_ | Introduction of a | spCas9 | spCas9 | NGG | TGG |
| 160556135_spCas9 | Stop Codon | CBE | | | |
| CBE_NGG_20 nt_4- | Introduction of a | spCas9 | spCas9 | NGG | CGG |
| 9_003_+_160557486_ | Stop Codon | CBE | | | |
| spCas9 | | | | | |
| CBE_NGA_20 nt_4-9_006_−_ | Introduction of a | spCas9 | spCas9 | NGA | AGA |
| 160595418_spCas9 | Stop Codon | VRQR | | | |
| | | CBE | | | |
| CBE_NGA_20 nt_4-9_006_−_ | Introduction of a | spCas9 | spCas9 | NGA | AGA |
| 160557454_spCas9 | Stop Codon | VRQR | | | |
| | | CBE | | | |
| CBE_NGA_20 nt_4-9_006_−_ | Introduction of a | spCas9 | spCas9 | NGA | AGA |
| 160600981_spCas9 | Stop Codon | VRQR | | | |
| | | CBE | | | |
| CBE_NGA_20 nt_4-9_006_−_ | Introduction of a | spCas9 | spCas9 | NGA | GGA |
| 160586513_spCas9 | Stop Codon | VRQR | | | |
| | | CBE | | | |
| CBE_NGA_20 nt_4-9_006_−_ | Introduction of a | spCas9 | spCas9 | NGA | AGA |
| 160548542_spCas9 | Stop Codon | VRQR | | | |
| | | CBE | | | |
| CBE_NGA_20 nt_4- | Introduction of a | spCas9 | spCas9 | NGA | GGA |
| 9_006_+_160547802_ | Stop Codon | VRQR | | | |
| spCas9 | | CBE | | | |
| CBE_NGG_20 nt_4-9_003_−_ | Introduction of a | spCas9 | spCas9 | NGG | TGG |
| 160601057_spCas9 | Stop Codon | CBE | | | |
| CBE_NGA_20 nt_4-9_006_−_ | Introduction of a | spCas9 | spCas9 | NGA | AGA |
| 160585151_spCas9 | Stop Codon | VRQR | | | |
| | | CBE | | | |
| CBE_NGA_20 nt_4-9_006_−_ | Introduction of a | spCas9 | spCas9 | NGA | CGA |
| 160585164_spCas9 | Stop Codon | VRQR | | | |
| | | CBE | | | |
| CBE_NGA_20 nt_4-9_006_−_ | Introduction of a | spCas9 | spCas9 | NGA | TGA |
| 160577178_spCas9 | Stop Codon | VRQR | | | |
| | | CBE | | | |
| CBE_NGG_20 nt_4- | Splice Site | spCas9 | spCas9 | NGG | AGG |
| 9_003_+_160531882_ | Disruption | CBE | | | |
| spCas9 | | | | | |
| ABE_NGG_20 nt_3-9_002_−_ | Splice Site | spCas9 | spCas9 | NGG | GGG |
| 160531875_spCas9 | Disruption | ABE | | | |
| CBE_NGC_20 nt_4-9_009_−_ | Introduction of a | spCas9 | spCas9 | NGC | GGC |
| 160605140_spCas9 | Stop Codon | NGC CBE | | | |
| CBE_NGC_20 nt_4-9_009_−_ | Introduction of a | spCas9 | spCas9 | NGC | GGC |
| 160590927_spCas9 | Stop Codon | NGC CBE | | | |
| CBE_NGA_20 nt_4-9_006_−_ | Introduction of a | spCas9 | spCas9 | NGA | TGA |
| 160532600_spCas9 | Stop Codon | VRQR | | | |
| | | CBE | | | |
| ABE_NGA_20 nt_3- | Splice Site | spCas9 | spCas9 | NGA | AGA |
| 9_005_+_160595343_ | Disruption | VRQR | | | |
| spCas9 | | ABE | | | |
| ABE_NGG_20 nt_3- | Splice Site | spCas9 | spCas9 | NGG | AGG |
| 9_002_+_160548467_ | Disruption | ABE | | | |
| spCas9 | | | | | |
| CBE_NGA_20 nt_4-9_006_−_ | Introduction of a | spCas9 | spCas9 | NGA | GGA |
| 160650466_spCas9 | Stop Codon | VRQR | | | |
| | | CBE | | | |
| CBE_NGA_20 nt_4-9_006_−_ | Introduction of a | spCas9 | spCas9 | NGA | GGA |
| 160589681_spCas9 | Stop Codon | VRQR | | | |
| | | CBE | | | |
| CBE_NGA_20 nt_4-9_006_−_ | Introduction of a | spCas9 | spCas9 | NGA | GGA |
| 160594086_spCas9 | Stop Codon | VRQR | | | |
| | | CBE | | | |
| CBE_NGG_20 nt_4- | Splice Site | spCas9 | spCas9 | NGG | TGG |
| 9_003_+_160542801_ | Disruption | CBE | | | |
| spCas9 | | | | | |
| ABE_NGA_20 nt_3-9_005_−_ | Splice Site | spCas9 | spCas9 | NGA | TGA |
| 160542792_spCas9 | Disruption | VRQR | | | |
| | | ABE | | | |
| ABE_NGA_20 nt_3- | Splice Site | spCas9 | spCas9 | NGA | GGA |
| 9_005_+_160606467_ | Disruption | VRQR | | | |
| spCas9 | | ABE | | | |
| CBE_NGA_20 nt_4- | Splice Site | spCas9 | spCas9 | NGA | GGA |
| 9_006_+_160606467_ | Disruption | VRQR | | | |
| spCas9 | | CBE | | | |
| CBE_NGA_20 nt_4- | Splice Site | spCas9 | spCas9 | NGA | AGA |
| 9_006_+_160650493_ | Disruption | VRQR | | | |
| spCas9 | | CBE | | | |
| ABE_NGA_20 nt_3- | Splice Site | spCas9 | spCas9 | NGA | GGA |
| 9_005_+_160586439_ | Disruption | VRQR | | | |
| spCas9 | | ABE | | | |
| CBE_NGA_20 nt_4- | Splice Site | spCas9 | spCas9 | NGA | GGA |
| 9_006_+_160586439_ | Disruption | VRQR | | | |
| spCas9 | | CBE | | | |
| CBE_NGG_20 nt_4-9_003_−_ | Introduction of a | spCas9 | spCas9 | NGG | AGG |
| 160589682_spCas9 | Stop Codon | CBE | | | |
| CBE_NGG_20 nt_4-9_003_−_ | Introduction of a | spCas9 | spCas9 | NGG | AGG |
| 160594087_spCas9 | Stop Codon | CBE | | | |
| CBE_NGA_20 nt_4- | Splice Site | spCas9 | spCas9 | NGA | GGA |
| 9_006_+_160542803_ | Disruption | VRQR | | | |
| spCas9 | | CBE | | | |
| CBE_NGC_20 nt_4- | Introduction of a | spCas9 | spCas9 | NGC | AGC |
| 9_009_+_160600971_ | Stop Codon | NGC CBE | | | |
| spCas9 | | | | | |
| ABE_NGG_20 nt_3- | Splice Site | spCas9 | spCas9 | NGG | AGG |
| 9_002_+_160606466_ | Disruption | ABE | | | |
| spCas9 | | | | | |
| ABE_NGG_20 nt_3- | Splice Site | spCas9 | spCas9 | NGG | AGG |
| 9_002_+_160586438_ | Disruption | ABE | | | |
| spCas9 | | | | | |
| CBE_NGG_20 nt_4-9_003_−_ | Introduction of a | spCas9 | spCas9 | NGG | AGG |
| 160585162_spCas9 | Stop Codon | CBE | | | |
| CBE_NGA_20 nt_4-9_006_−_ | Introduction of a | spCas9 | spCas9 | NGA | GGA |
| 160605161_spCas9 | Stop Codon | VRQR | | | |
| | | CBE | | | |
| CBE_NGA_20 nt_4- | Splice Site | spCas9 | spCas9 | NGA | AGA |
| 9_006_+_160605201_ | Disruption | VRQR | | | |
| spCas9 | | CBE | | | |
| CBE_NGA_20 nt_4- | Splice Site | spCas9 | spCas9 | NGA | AGA |
| 9_006_+_160650490_ | Disruption | VRQR | | | |
| spCas9 | | CBE | | | |
| CBE_NGG_20 nt_4- | Splice Site | spCas9 | spCas9 | NGG | GGG |
| 9_003_+_160531884_ | Disruption | CBE | | | |
| spCas9 | | | | | |
| CBE_NGA_20 nt_4- | Splice Site | spCas9 | spCas9 | NGA | AGA |
| 9_006_+_160599652_ | Disruption | VRQR | | | |
| spCas9 | | CBE | | | |
| CBE_NGG_20 nt_4-9_003_−_ | Introduction of a | spCas9 | spCas9 | NGG | AGG |
| 160548494_spCas9 | Stop Codon | CBE | | | |
| CBE_NGA_20 nt_4-9_006_−_ | Introduction of a | spCas9 | spCas9 | NGA | TGA |
| 160585159_spCas9 | Stop Codon | VRQR | | | |
| | | CBE | | | |
| CBE_NGC_20 nt_4- | Introduction of a | spCas9 | spCas9 | NGC | AGC |
| 9_009_+_160591044_ | Stop Codon | NGC CBE | | | |
| spCas9 | | | | | |
| CBE_NGG_20 nt_4- | Introduction of a | spCas9 | spCas9 | NGG | AGG |
| 9_003_+_160601041_ | Stop Codon | CBE | | | |
| spCas9 | | | | | |
| CBE_NGA_20 nt_4- | Introduction of a | spCas9 | spCas9 | NGA | AGA |
| 9_006_+_160557514_ | Stop Codon | VRQR | | | |
| spCas9 | | CBE | | | |
| ABE_NGA_20 nt_3-9_005_−_ | Splice Site | spCas9 | spCas9 | NGA | TGA |
| 160537943_spCas9 | Disruption | VRQR | | | |
| | | ABE | | | |
| CBE_NGA_20 nt_4- | Splice Site | spCas9 | spCas9 | NGA | GGA |
| 9_006_+_160531885_ | Disruption | VRQR | | | |
| spCas9 | | CBE | | | |
| CBE_NGG_20 nt_4-9_003_−_ | Introduction of a | spCas9 | spCas9 | NGG | GGG |
| 160548493_spCas9 | Stop Codon | CBE | | | |
| CBE_NGG_20 nt_4-9_003_−_ | Introduction of a | spCas9 | spCas9 | NGG | TGG |
| 160578507_spCas9 | Stop Codon | CBE | | | |
| CBE_NGG_20 nt_4-9_003_−_ | Introduction of a | spCas9 | spCas9 | NGG | TGG |
| 160590928_spCas9 | Stop Codon | CBE | | | |
| CBE_NGG_20 nt_4-9_003_−_ | Introduction of a | spCas9 | spCas9 | NGG | TGG |
| 160606461_spCas9 | Stop Codon | CBE | | | |
| CBE_NGG_20 nt_4-9_003_−_ | Introduction of a | spCas9 | spCas9 | NGG | AGG |
| 160650467_spCas9 | Stop Codon | CBE | | | |
| CBE_NGC_20 nt_4-9_009_−_ | Introduction of a | spCas9 | spCas9 | NGC | GGC |
| 160601056_spCas9 | Stop Codon | NGC CBE | | | |
| CBE_NGG_20 nt_4- | Splice Site | spCas9 | spCas9 | NGG | GGG |
| 9_003_+_160531883_ | Disruption | CBE | | | |
| spCas9 | | | | | |
| ABE_NGC_20 nt_3-9_008_−_ | Splice Site | spCas9 | spCas9 | NGC | GGC |
| 160531874_spCas9 | Disruption | NGC | | | |
| | | ABE | | | |
| ABE_NGA_20 nt_3-9_005_−_ | Splice Site | spCas9 | spCas9 | NGA | GGA |
| 160599646_spCas9 | Disruption | VRQR | | | |
| | | ABE | | | |
| ABE_NGC_20 nt_3- | Splice Site | spCas9 | spCas9 | NGC | AGC |
| 9_008_+_160595346_ | Disruption | NGC | | | |
| spCas9 | | ABE | | | |
| CBE_NGC_20 nt_4- | Splice Site | spCas9 | spCas9 | NGC | AGC |
| 9_009_+_160595346_ | Disruption | NGC CBE | | | |
| spCas9 | | | | | |
| ABE_NGA_20 nt_3-9_005_−_ | Splice Site | spCas9 | spCas9 | NGA | GGA |
| 160547922_spCas9 | Disruption | VRQR | | | |
| | | ABE | | | |
| ABE_NGC_20 nt_3- | Splice Site | spCas9 | spCas9 | NGC | AGC |
| 9_008_+_160557382_ | Disruption | NGC | | | |
| spCas9 | | ABE | | | |
| CBE_NGC_20 nt_4- | Splice Site | spCas9 | spCas9 | NGC | AGC |
| 9_009_+_160557382_ | Disruption | NGC CBE | | | |
| spCas9 | | | | | |
| ABE_NGC_20 nt_3- | Splice Site | spCas9 | spCas9 | NGC | AGC |
| 9_008_+_160600909_ | Disruption | NGC | | | |
| spCas9 | | ABE | | | |
| CBE_NGC_20 nt_4- | Splice Site | spCas9 | spCas9 | NGC | AGC |
| 9_009_+_160600909_ | Disruption | NGC CBE | | | |
| spCas9 | | | | | |
| CBE_NGC_20 nt_4-9_009_−_ | Introduction of a | spCas9 | spCas9 | NGC | TGC |
| 160600902_spCas9 | Stop Codon | NGC CBE | | | |
| ABE_NGC_20 nt_3-9_008_−_ | Splice Site | spCas9 | spCas9 | NGC | AGC |
| 160585188_spCas9 | Disruption | NGC | | | |
| | | ABE | | | |
| ABE_NGC_20 nt_3-9_008_−_ | Splice Site | spCas9 | spCas9 | NGC | AGC |
| 160577278_spCas9 | Disruption | NGC | | | |
| | | ABE | | | |
| ABE_NGG_20 nt_3-9_002_−_ | Splice Site | spCas9 | spCas9 | NGG | GGG |
| 160547923_spCas9 | Disruption | ABE | | | |
| ABE_NGC_20 nt_3-9_008_−_ | Splice Site | spCas9 | spCas9 | NGC | AGC |
| 160650480_spCas9 | Disruption | NGC | | | |
| | | ABE | | | |
| ABE_NGG_20 nt_3-9_002_−_ | Splice Site | spCas9 | spCas9 | NGG | TGG |
| 160547924_spCas9 | Disruption | ABE | | | |
| | | | Target Nucleotide | Location of target site | |
| | | SEQ | Position in Target | on Chr6 (hg38.2bit | |
| | | ID | Sequence (from 5′ | genome sequence) | |
| Guide Name | Target Sequence | NO | end) | start | end |
| ABE_NGA_20 nt_3- | AAACGTACTTCTT | 1408 | 7 | 160541098 | 160541121 |
| 9_005_+_160541098_ | CAAGCAGTGA | | | | |
| spCas9 | | | | | |
| CBE_NGA_20 nt_4- | AAACGTACTTCTT | 1409 | 8 | 160541098 | 160541121 |
| 9_006_+_160541098_ | CAAGCAGTGA | | | | |
| spCas9 | | | | | |
| CBE_NGG_20 nt_4- | AAAACACCAAGGG | 1406 | 8, 7 | 160548601 | 160548624 |
| 9_003_+_160548601_ | CCTGTATCGG | | | | |
| spCas9 | | | | | |
| CBE_NGC_20 nt_4- | AAACACCAAGGGC | 1407 | 7, 6 | 160548602 | 160548625 |
| 9_009_+_160548602_ | CTGTATCGGC | | | | |
| spCas9 | | | | | |
| ABE_NGG_20 nt_3- | AACACAGGTACCT | 1410 | 6 | 160532633 | 160532656 |
| 9_002_−_ | TTGGGACTGG | | | | |
| 160532633_spCas9 | | | | | |
| CBE_NGA_20 nt_4- | AACACCAAGGGGC | 1411 | 6, 5 | 160601042 | 160601065 |
| 9_006_+_160601042_ | TGCCACAGGA | | | | |
| spCas9 | | | | | |
| CBE_NGA_20 nt_4- | AAGCCACTGGAAA | 1412 | 7 | 160601092 | 160601115 |
| 9_006_+_160601092_ | TTCCAAAAGA | | | | |
| _spCas9 | | | | | |
| CBE_NGA_20 nt_4- | AAGGCAGTCCATT | 1413 | 9 | 160600969 | 160600992 |
| 9_006_+_160600969_ | CTGCATCTGA | | | | |
| spCas9 | | | | | |
| ABE_NGG_20 nt_3- | AATTTCTTACCTT | 1414 | 9 | 160578512 | 160578535 |
| 9_002_+_160578512_ | GTTCAGAAGG | | | | |
| spCas9 | | | | | |
| ABE_NGC_20 nt_3- | ACACAGGTACCTT | 1415 | 5 | 160532632 | 160532655 |
| 9_008_−_ | TGGGACTGGC | | | | |
| 160532632_spCas9 | | | | | |
| CBE_NGG_20 nt_4- | ACAGTCCAGGACT | 1416 | 7 | 160589669 | 160589692 |
| 9_003_−_ | GCTACCATGG | | | | |
| 160589669_spCas9 | | | | | |
| CBE_NGG_20 nt_4- | ACGCGATGCTCAG | 1417 | 4 | 160548539 | 160548562 |
| 9_003_−_ | ACACAGAAGG | | | | |
| 160548539_spCas9 | | | | | |
| ABE_NGC_20 nt_3- | ACGTACTTCTTCA | 1418 | 5 | 160541100 | 160541123 |
| 9_008_+_160541100_ | AGCAGTGAGC | | | | |
| spCas9 | | | | | |
| CBE_NGC_20 nt_4- | ACGTACTTCTTCA | 1419 | 6 | 160541100 | 160541123 |
| 9_009_+_160541100_ | AGCAGTGAGC | | | | |
| spCas9 | | | | | |
| CBE_NGA_20 nt_4- | AGCCCAGCTCCTT | 1420 | 5 | 160532598 | 160532621 |
| 9_006_−_ | GTTATTGAGA | | | | |
| 160532598_spCas9 | | | | | |
| CBE_NGG_20 nt_4- | AGGATGCTGTGGC | 1421 | 7 | 160542802 | 160542825 |
| 9_003_+_160542802_ | ACAAGGTGGG | | | | |
| spCas9 | | | | | |
| CBE_NGC_20 nt_4- | AGGCCTGTAAGGA | 1422 | 5 | 160537957 | 160537980 |
| 9_009_+_160537957_ | AAGTATTAGC | | | | |
| spCas9 | | | | | |
| CBE_NGA_20 nt_4- | AGTACTCCCACCT | 1423 | 9, 8 | 160557482 | 160557505 |
| 9_006_+_160557482_ | CACACACGGA | | | | |
| spCas9 | | | | | |
| CBE_NGA_20 nt_4- | AGTGCTGAAATTA | 1424 | 5 | 160599655 | 160599678 |
| 9_006_+_160599655_ | AAACAGAAGA | | | | |
| spCas9 | | | | | |
| CBE_NGA_20 nt_4- | ATGTCAATCTTGG | 1425 | 5 | 160556067 | 160556090 |
| 9_006_−_ | TCATCCATGA | | | | |
| 160556067_spCas9 | | | | | |
| CBE_NGC_20 nt_4- | ATTATGGACAGAG | 1426 | 9 | 160599594 | 160599617 |
| 9_009_−_ | TTACCGAGGC | | | | |
| 160599594_spCas9 | | | | | |
| CBE_NGC_20 nt_4- | CACACAAGCAGAT | 1427 | 5 | 160540055 | 160540078 |
| 9_009_−_ | ATTGCCTTGC | | | | |
| 160540055_spCas9 | | | | | |
| CBE_NGA_20 nt_4- | CACCAGCATAGTC | 1428 | 4 | 160599514 | 160599537 |
| 9_006_−_ | GGACCCCAGA | | | | |
| 160599514_spCas9 | | | | | |
| CBE_NGG_20 nt_4- | CAGTACTCCCACC | 1429 | 9 | 160557481 | 160557504 |
| 9_003_+_160557481_ | TCACACACGG | | | | |
| spCas9 | | | | | |
| CBE_NGA_20 nt_4- | CATCAACATAATA | 1430 | 4 | 160650352 | 160650375 |
| 9_006_−_ | GGACCACAGA | | | | |
| 160650352_spCas9 | | | | | |
| CBE_NGC_20 nt_4- | CATCCAGGTTCCA | 1431 | 5 | 160548492 | 160548515 |
| 9_009_−_ | AGCCTAGGGC | | | | |
| 160548492_spCas9 | | | | | |
| CBE_NGC_20 nt_4- | CCAAACCTAGAAA | 1432 | 7 | 160541175 | 160541198 |
| 9_009_+_160541175_ | GAAAACATGC | | | | |
| spCas9 | | | | | |
| CBE_NGG_20 nt_4- | CCTGCCCATTTAT | 1433 | 7, 6 | 160547801 | 160547824 |
| 9_003_+_160547801_ | TTGTCCCTGG | | | | |
| spCas9 | | | | | |
| CBE_NGA_20 nt_4- | CGATGCCAATGTG | 1434 | 7, 6 | 160585072 | 160585095 |
| 9_006_+_160585072_ | GTGTCATAGA | | | | |
| spCas9 | | | | | |
| CBE_NGG_20 nt_4- | CGGCAGTGCTACC | 1435 | 4 | 160556135 | 160556158 |
| 9_003_−_ | ATGGTAATGG | | | | |
| 160556135_spCas9 | | | | | |
| CBE_NGG_20 nt_4- | CTCCCACCTCACA | 1436 | 5, 4 | 160557486 | 160557509 |
| 9_003_+_160557486_ | CACGGATCGG | | | | |
| spCas9 | | | | | |
| CBE_NGA_20 nt_4- | CTGACACAATGCC | 1437 | 7 | 160595418 | 160595441 |
| 9_006_−_ | TGGTGACAGA | | | | |
| 160595418_spCas9 | | | | | |
| CBE_NGA_20 nt_4- | CTGACACAATGCT | 1438 | 7 | 160557454 | 160557477 |
| 9_006_−_ | CAGAAACAGA | | | | |
| 160557454_spCas9 | | | | | |
| CBE_NGA_20 nt_4- | CTGACACGATGCT | 1439 | 7 | 160600981 | 160601004 |
| 9_006_−_ | CAGATGCAGA | | | | |
| 160600981_spCas9 | | | | | |
| CBE_NGA_20 nt_4- | CTGACGCAATGTC | 1440 | 7 | 160586513 | 160586536 |
| 9_006_−_ | CAGTGATGGA | | | | |
| 160586513_spCas9 | | | | | |
| CBE_NGA_20 nt_4- | CTGACGCGATGCT | 1441 | 7 | 160548542 | 160548565 |
| 9_006_−_ | CAGACACAGA | | | | |
| 160548542_spCas9 | | | | | |
| CBE_NGA_20 nt_4- | CTGCCCATTTATT | 1442 | 6, 5 | 160547802 | 160547825 |
| 9_006_+_160547802_ | TGTCCCTGGA | | | | |
| spCas9 | | | | | |
| CBE_NGG_20 nt_4- | CTGCCGAAATCCA | 1443 | 5 | 160601057 | 160601080 |
| 9_003_−_ | GATCCTGTGG | | | | |
| 160601057_spCas9 | | | | | |
| CBE_NGA_20 nt_4- | CTGCTACCGAGGT | 1444 | 8 | 160585151 | 160585174 |
| 9_006_−_ | GATGGACAGA | | | | |
| 160585151_spCas9 | | | | | |
| CBE_NGA_20 nt_4- | CTGGGGTCCAGGA | 1445 | 9 | 160585164 | 160585187 |
| 9_006_−_ | CTGCTACCGA | | | | |
| 160585164_spCas9 | | | | | |
| CBE_NGA_20 nt_4- | CTGTCAATCTTGG | 1446 | 5 | 160577178 | 160577201 |
| 9_006_−_ | TCATCTATGA | | | | |
| 160577178_spCas9 | | | | | |
| CBE_NGG_20 nt_4- | CTGTCACCCTAAA | 1447 | 9 | 160531882 | 160531905 |
| 9_003_+_160531882_ | CAGAGGTAGG | | | | |
| spCas9 | | | | | |
| ABE_NGG_20 nt_3- | CTGTTTAGGGTGA | 1448 | 7 | 160531875 | 160531898 |
| 9_002_−_ | CAGTGGAGGG | | | | |
| 160531875_spCas9 | | | | | |
| CBE_NGC_20 nt_4- | GAAATGGACAGAG | 1449 | 9 | 160605140 | 160605163 |
| 9_009_−_ | TTATCAAGGC | | | | |
| 160605140_spCas9 | | | | | |
| CBE_NGC_20 nt_4- | GAACAAGGTAAGA | 1450 | 4 | 160590927 | 160590950 |
| 9_009_−_ | AGTCTCTGGC | | | | |
| 160590927_spCas9 | | | | | |
| CBE_NGA_20 nt_4- | GAAGCCCAGCTCC | 1451 | 7 | 160532600 | 160532623 |
| 9_006_−_ | TTGTTATTGA | | | | |
| 160532600_spCas9 | | | | | |
| ABE_NGA_20 nt_3- | GACTTCCTACCTT | 1452 | 9 | 160595343 | 160595366 |
| 9_005_+_160595343_ | CTTCAGAAGA | | | | |
| spCas9 | | | | | |
| ABE_NGG_20 nt_3- | GACTTCTTACCTT | 1453 | 9 | 160548467 | 160548490 |
| 9_002_+_160548467_ | GTTCAGAAGG | | | | |
| spCas9 | | | | | |
| CBE_NGA_20 nt_4- | GAGCAAAGCCATG | 1454 | 4 | 160650466 | 160650489 |
| 9_006_−_ | TGGTCCAGGA | | | | |
| 160650466_spCas9 | | | | | |
| CBE_NGA_20 nt_4- | GAGCAAAGCCCCA | 1455 | 4 | 160589681 | 160589704 |
| 9_006_−_ | CAGTCCAGGA | | | | |
| 160589681_spCas9 | | | | | |
| CBE_NGA_20 nt_4- | GAGCAAAGCCCCG | 1456 | 4 | 160594086 | 160594109 |
| 9_006_−_ | GGGTCCAGGA | | | | |
| 160594086_spCas9 | | | | | |
| CBE_NGG_20 nt_4- | GAGGATGCTGTGG | 1457 | 8 | 160542801 | 160542824 |
| 9_003_+_160542801_ | CACAAGGTGG | | | | |
| spCas9 | | | | | |
| ABE_NGA_20 nt_3- | GCCACAGCATCCT | 1458 | 6 | 160542792 | 160542815 |
| 9_005_−_ | CTTCATTTGA | | | | |
| 160542792_spCas9 | | | | | |
| ABE_NGA_20 nt_3- | GCTCCTTACCTTG | 1459 | 8 | 160606467 | 160606490 |
| 9_005_+_160606467_ | TTCAGAAGGA | | | | |
| spCas9 | | | | | |
| CBE_NGA_20 nt_4- | GCTCCTTACCTTG | 1460 | 9 | 160606467 | 160606490 |
| 9_006_+_160606467_ | TTCAGAAGGA | | | | |
| spCas9 | | | | | |
| CBE_NGA_20 nt_4- | GCTGCTAAAATTA | 1461 | 5 | 160650493 | 160650516 |
| 9_006_+_160650493_ | AAACAGAAGA | | | | |
| spCas9 | | | | | |
| ABE_NGA_20 nt_3- | GCTTCTTACCTTC | 1462 | 8 | 160586439 | 160586462 |
| 9_005_+_160586439_ | TTCAGAAGGA | | | | |
| spCas9 | | | | | |
| CBE_NGA_20 nt_4- | GCTTCTTACCTTC | 1463 | 9 | 160586439 | 160586462 |
| 9_006_+_160586439_ | TTCAGAAGGA | | | | |
| spCas9 | | | | | |
| CBE_NGG_20 nt_4- | GGAGCAAAGCCCC | 1464 | 5 | 160589682 | 160589705 |
| 9_003_−_ | ACAGTCCAGG | | | | |
| 160589682_spCas9 | | | | | |
| CBE_NGG_20 nt_4- | GGAGCAAAGCCCC | 1465 | 5 | 160594087 | 160594110 |
| 9_003_−_ | GGGGTCCAGG | | | | |
| 160594087_spCas9 | | | | | |
| CBE_NGA_20 nt_4- | GGATGCTGTGGCA | 1466 | 6 | 160542803 | 160542826 |
| 9_006_+_160542803_ | CAAGGTGGGA | | | | |
| spCas9 | | | | | |
| CBE_NGC_20 nt_4- | GGCAGTCCATTCT | 1467 | 8, 7 | 160600971 | 160600994 |
| 9_009_+_160600971_ | GCATCTGAGC | | | | |
| spCas9 | | | | | |
| ABE_NGG_20 nt_3- | GGCTCCTTACCTT | 1468 | 9 | 160606466 | 160606489 |
| 9_002_+_160606466_ | GTTCAGAAGG | | | | |
| spCas9 | | | | | |
| ABE_NGG_20 nt_3- | GGCTTCTTACCTT | 1469 | 9 | 160586438 | 160586461 |
| 9_002_+_160586438_ | CTTCAGAAGG | | | | |
| spCas9 | | | | | |
| CBE_NGG_20 nt_4- | GGGGTCCAGGACT | 1470 | 7 | 160585162 | 160585185 |
| 9_003_−_ | GCTACCGAGG | | | | |
| 160585162_spCas9 | | | | | |
| CBE_NGA_20 nt_4- | GGGTGCAGGAGTG | 1471 | 6 | 160605161 | 160605184 |
| 9_006_−_ | CTACCACGGA | | | | |
| 160605161_spCas9 | | | | | |
| CBE_NGA_20 nt_4- | GGTGCTGAAATGA | 1472 | 5 | 160605201 | 160605224 |
| 9_006_+_160605201_ | AAAGAAAAGA | | | | |
| spCas9 | | | | | |
| CBE_NGA_20 nt_4- | GGTGCTGCTAAAA | 1473 | 8 | 160650490 | 160650513 |
| 9_006_+_160650490_ | TTAAAACAGA | | | | |
| spCas9 | | | | | |
| CBE_NGG_20 nt_4- | GTCACCCTAAACA | 1474 | 7 | 160531884 | 160531907 |
| 9_003_+_160531884_ | GAGGTAGGGG | | | | |
| spCas9 | | | | | |
| CBE_NGA_20 nt_4- | GTCAGTGCTGAAA | 1475 | 8 | 160599652 | 160599675 |
| 9_006_+_16059965 | TTAAAACAGA | | | | |
| 2_spCas9 | | | | | |
| CBE_NGG_20 nt_4- | GTCATCCAGGTTC | 1476 | 7 | 160548494 | 160548517 |
| 9_003_−_ | CAAGCCTAGG | | | | |
| 160548494_spCas9 | | | | | |
| CBE_NGA_20 nt_4- | GTCCAGGACTGCT | 1477 | 4 | 160585159 | 160585182 |
| 9_006_−_ | ACCGAGGTGA | | | | |
| 160585159_spCas9 | | | | | |
| CBE_NGC_20 nt_4- | TAACACCAAGGAC | 1478 | 7, 6 | 160591044 | 160591067 |
| 9_009_+_160591044_ | TAATCTCAGC | | | | |
| spCas9 | | | | | |
| CBE_NGG_20 nt_4- | TAACACCAAGGGG | 1479 | 7, 6 | 160601041 | 160601064 |
| 9_003_+_160601041_ | CTGCCACAGG | | | | |
| spCas9 | | | | | |
| CBE_NGA_20 nt_4- | TAACACCAGGGTT | 1480 | 7, 6 | 160557514 | 160557537 |
| 9_006_+_160557514_ | GTTTCCCAGA | | | | |
| spCas9 | | | | | |
| ABE_NGA_20 nt_3- | TACAGGCCTGCCG | 1481 | 4 | 160537943 | 160537966 |
| 9_005_−_ | TCATCACTGA | | | | |
| 160537943_spCas9 | | | | | |
| CBE_NGA_20 nt_4- | TCACCCTAAACAG | 1482 | 6 | 160531885 | 160531908 |
| 9_006_+_160531885_ | AGGTAGGGGA | | | | |
| spCas9 | | | | | |
| CBE_NGG_20 nt_4- | TCATCCAGGTTCC | 1483 | 6 | 160548493 | 160548516 |
| 9_003_−_ | AAGCCTAGGG | | | | |
| 160548493_spCas9 | | | | | |
| CBE_NGG_20 nt_4- | TGAACAAGGTAAG | 1484 | 5 | 160578507 | 160578530 |
| 9_003_−_ | AAATTTGTGG | | | | |
| 160578507_spCas9 | | | | | |
| CBE_NGG_20 nt_4- | TGAACAAGGTAAG | 1485 | 5 | 160590928 | 160590951 |
| 9_003_−_ | AAGTCTCTGG | | | | |
| 160590928_spCas9 | | | | | |
| CBE_NGG_20 nt_4- | TGAACAAGGTAAG | 1486 | 5 | 160606461 | 160606484 |
| 9_003_−_ | GAGCCTGTGG | | | | |
| 160606461_spCas9 | | | | | |
| CBE_NGG_20 nt_4- | TGAGCAAAGCCAT | 1487 | 5 | 160650467 | 160650490 |
| 9_003_−_ | GTGGTCCAGG | | | | |
| 160650467_spCas9 | | | | | |
| CBE_NGC_20 nt_4- | TGCCGAAATCCAG | 1488 | 4 | 160601056 | 160601079 |
| 9_009_−_ | ATCCTGTGGC | | | | |
| 160601056_spCas9 | | | | | |
| CBE_NGG_20 nt_4- | TGTCACCCTAAAC | 1489 | 8 | 160531883 | 160531906 |
| 9_003_+_160531883_ | AGAGGTAGGG | | | | |
| spCas9 | | | | | |
| ABE_NGC_20 nt_3- | TGTTTAGGGTGAC | 1490 | 6 | 160531874 | 160531897 |
| 9_008_−_ | AGTGGAGGGC | | | | |
| 160531874_spCas9 | | | | | |
| ABE_NGA_20 nt_3- | TTAATTTCAGCAC | 1491 | 9 | 160599646 | 160599669 |
| 9_005_−_ | TGACTGAGGA | | | | |
| 160599646_spCas9 | | | | | |
| ABE_NGC_20 nt_3- | TTCCTACCTTCTT | 1492 | 6 | 160595346 | 160595369 |
| 9_008_+_160595346_ | CAGAAGAAGC | | | | |
| spCas9 | | | | | |
| CBE_NGC_20 nt_4- | TTCCTACCTTCTT | 1493 | 7 | 160595346 | 160595369 |
| 9_009_+_160595346_ | CAGAAGAAGC | | | | |
| spCas9 | | | | | |
| ABE_NGA_20 nt_3- | TTCTACAGACTGT | 1494 | 7 | 160547922 | 160547945 |
| 9_005_−_ | ATGTTTGGGA | | | | |
| 160547922_spCas9 | | | | | |
| ABE_NGC_20 nt_3- | TTCTTACCTGCTT | 1495 | 6 | 160557382 | 160557405 |
| 9_008_+_160557382_ | CAGAATGAGC | | | | |
| spCas9 | | | | | |
| CBE_NGC_20 nt_4- | TTCTTACCTGCTT | 1496 | 7 | 160557382 | 160557405 |
| 9_009_+_160557382_ | CAGAATGAGC | | | | |
| spCas9 | | | | | |
| ABE_NGC_20 nt_3- | TTCTTACCTTGTT | 1497 | 6 | 160600909 | 160600932 |
| 9_008_+_160600909_ | CAAAAAAAGC | | | | |
| spCas9 | | | | | |
| CBE_NGC_20 nt_4- | TTCTTACCTTGTT | 1498 | 7 | 160600909 | 160600932 |
| 9_009_+_160600909_ | CAAAAAAAGC | | | | |
| spCas9 | | | | | |
| CBE_NGC_20 nt_4- | TTGAACAAGGTAA | 1499 | 6 | 160600902 | 160600925 |
| 9_009_−_ | GAAGTTGTGC | | | | |
| 160600902_spCas9 | | | | | |
| ABE_NGC_20 nt_3- | TTTCAGCACCAAC | 1500 | 5 | 160585188 | 160585211 |
| 9_008_−_ | TGAAAACAGC | | | | |
| 160585188_spCas9 | | | | | |
| ABE_NGC_20 nt_3- | TTTCAGCACCACC | 1501 | 5 | 160577278 | 160577301 |
| 9_008_−_ | TGAGAAAAGC | | | | |
| 160577278_spCas9 | | | | | |
| ABE_NGG_20 nt_3- | TTTCTACAGACTG | 1502 | 8 | 160547923 | 160547946 |
| 9_002_−_ | TATGTTTGGG | | | | |
| 160547923_spCas9 | | | | | |
| ABE_NGC_20 nt_3- | TTTTAGCAGCACC | 1503 | 5 | 160650480 | 160650503 |
| 9_008_−_ | TGAGCAAAGC | | | | |
| 160650480_spCas9 | | | | | |
| ABE_NGG_20 nt_3- | TTTTCTACAGACT | 1504 | 9 | 160547924 | 160547947 |
| 9_002_−_ | GTATGTTTGG | | | | |
| 160547924_spCas9 | | | | | |

| | | SEQ ID |
|---|---|---|
| Guide Name | Spacer Sequence | NO |
| ABE_NGA_20 nt_3-9_005_+_160541098_spCas9 | AAACGUACUUCUUCAAGCAG | 1507 |
| CBE_NGA_20 nt_4-9_006_+_160541098_spCas9 | AAACGUACUUCUUCAAGCAG | 1508 |
| CBE_NGG_20 nt_4-9_003_+_160548601_spCas9 | AAAACACCAAGGGCCUGUAU | 1505 |
| CBE_NGC_20 nt_4-9_009_+_160548602_spCas9 | AAACACCAAGGGCCUGUAUC | 1506 |
| ABE_NGG_20 nt_3-9_002_−_160532633_spCas9 | AACACAGGUACCUUUGGGAC | 1509 |
| CBE_NGA_20 nt_4-9_006_+_160601042_spCas9 | AACACCAAGGGGCUGCCACA | 1510 |
| CBE_NGA_20 nt_4-9_006_+_160601092_spCas9 | AAGCCACUGGAAAUUCCAAA | 1511 |
| CBE_NGA_20 nt_4-9_006_+_160600969_spCas9 | AAGGCAGUCCAUUCUGCAUC | 1512 |
| ABE_NGG_20 nt_3-9_002_+_160578512_spCas9 | AAUUUCUUACCUUGUUCAGA | 1513 |
| ABE_NGC_20 nt_3-9_008_−_160532632_spCas9 | ACACAGGUACCUUUGGGACU | 1514 |
| CBE_NGG_20 nt_4-9_003_−_160589669_spCas9 | ACAGUCCAGGACUGCUACCA | 1515 |
| CBE_NGG_20 nt_4-9_003_−_160548539_spCas9 | ACGCGAUGCUCAGACACAGA | 1516 |
| ABE_NGC_20 nt_3-9_008_+_160541100_spCas9 | ACGUACUUCUUCAAGCAGUG | 1517 |
| CBE_NGC_20 nt_4-9_009_+_160541100_spCas9 | ACGUACUUCUUCAAGCAGUG | 1518 |
| CBE_NGA_20 nt_4-9_006_−_160532598_spCas9 | AGCCCAGCUCCUUGUUAUUG | 1519 |
| CBE_NGG_20 nt_4-9_003_+_160542802_spCas9 | AGGAUGCUGUGGCACAAGGU | 1520 |
| CBE_NGC_20 nt_4-9_009_+_160537957_spCas9 | AGGCCUGUAAGGAAAGUAUU | 1521 |
| CBE_NGA_20 nt_4-9_006_+_160557482_spCas9 | AGUACUCCCACCUCACACAC | 1522 |
| CBE_NGA_20 nt_4-9_006_+_160599655_spCas9 | AGUGCUGAAAUUAAAACAGA | 1523 |
| CBE_NGA_20 nt_4-9_006_−_160556067_spCas9 | AUGUCAAUCUUGGUCAUCCA | 1524 |
| CBE_NGC_20 nt_4-9_009_−_160599594_spCas9 | AUUAUGGACAGAGUUACCGA | 1525 |
| CBE_NGC_20 nt_4-9_009_−_160540055_spCas9 | CACACAAGCAGAUAUUGCCU | 1526 |
| CBE_NGA_20 nt_4-9_006_−_160599514_spCas9 | CACCAGCAUAGUCGGACCCC | 1527 |
| CBE_NGG_20 nt_4-9_003_+_160557481_spCas9 | CAGUACUCCCACCUCACACA | 1528 |
| CBE_NGA_20 nt_4-9_006_−_160650352_spCas9 | CAUCAACAUAAUAGGACCAC | 1529 |
| CBE_NGC_20 nt_4-9_009_−_160548492_spCas9 | CAUCCAGGUUCCAAGCCUAG | 1530 |
| CBE_NGC_20 nt_4-9_009_+_160541175_spCas9 | CCAAACCUAGAAAGAAAACA | 1531 |
| CBE_NGG_20 nt_4-9_003_+_160547801_spCas9 | CCUGCCCAUUUAUUUGUCCC | 1532 |
| CBE_NGA_20 nt_4-9_006_+_160585072_spCas9 | CGAUGCCAAUGUGGUGUCAU | 1533 |
| CBE_NGG_20 nt_4-9_003_−_160556135_spCas9 | CGGCAGUGCUACCAUGGUAA | 1534 |
| CBE_NGG_20 nt_4-9_003_+_160557486_spCas9 | CUCCCACCUCACACACGGAU | 1535 |
| CBE_NGA_20 nt_4-9_006_−_160595418_spCas9 | CUGACACAAUGCCUGGUGAC | 1536 |
| CBE_NGA_20 nt_4-9_006_−_160557454_spCas9 | CUGACACAAUGCUCAGAAAC | 1537 |
| CBE_NGA_20 nt_4-9_006_−_160600981_spCas9 | CUGACACGAUGCUCAGAUGC | 1538 |
| CBE_NGA_20 nt_4-9_006_−_160586513_spCas9 | CUGACGCAAUGUCCAGUGAU | 1539 |
| CBE_NGA_20 nt_4-9_006_−_160548542_spCas9 | CUGACGCGAUGCUCAGACAC | 1540 |
| CBE_NGA_20 nt_4-9_006_+_160547802_spCas9 | CUGCCCAUUUAUUUGUCCCU | 1541 |
| CBE_NGG_20 nt_4-9_003_−_160601057_spCas9 | CUGCCGAAAUCCAGAUCCUG | 1542 |
| CBE_NGA_20 nt_4-9_006_−_160585151_spCas9 | CUGCUACCGAGGUGAUGGAC | 1543 |
| CBE_NGA_20 nt_4-9_006_−_160585164_spCas9 | CUGGGGUCCAGGACUGCUAC | 1544 |
| CBE_NGA_20 nt_4-9_006_−_160577178_spCas9 | CUGUCAAUCUUGGUCAUCUA | 1545 |
| CBE_NGG_20 nt_4-9_003_+_160531882_spCas9 | CUGUCACCCUAAACAGAGGU | 1546 |
| ABE_NGG_20 nt_3-9_002_−_160531875_spCas9 | CUGUUUAGGGUGACAGUGGA | 1547 |
| CBE_NGC_20 nt_4-9_009_−_160605140_spCas9 | GAAAUGGACAGAGUUAUCAA | 1548 |
| CBE_NGC_20 nt_4-9_009_−_160590927_spCas9 | GAACAAGGUAAGAAGUCUCU | 1549 |
| CBE_NGA_20 nt_4-9_006_−_160532600_spCas9 | GAAGCCCAGCUCCUUGUUAU | 1550 |
| ABE_NGA_20 nt_3-9_005_+_160595343_spCas9 | GACUUCCUACCUUCUUCAGA | 1551 |
| ABE_NGG_20 nt_3-9_002_+_160548467_spCas9 | GACUUCUUACCUUGUUCAGA | 1552 |
| CBE_NGA_20 nt_4-9_006_−_160650466_spCas9 | GAGCAAAGCCAUGUGGUCCA | 1553 |
| CBE_NGA_20 nt_4-9_006_−_160589681_spCas9 | GAGCAAAGCCCCACAGUCCA | 1554 |
| CBE_NGA_20 nt_4-9_006_−_160594086_spCas9 | GAGCAAAGCCCCGGGGUCCA | 1555 |
| CBE_NGG_20 nt_4-9_003_+_160542801_spCas9 | GAGGAUGCUGUGGCACAAGG | 1556 |
| ABE_NGA_20 nt_3-9_005_−_160542792_spCas9 | GCCACAGCAUCCUCUUCAUU | 1557 |
| ABE_NGA_20 nt_3-9_005_+_160606467_spCas9 | GCUCCUUACCUUGUUCAGAA | 1558 |
| CBE_NGA_20 nt_4-9_006_+_160606467_spCas9 | GCUCCUUACCUUGUUCAGAA | 1559 |
| CBE_NGA_20 nt_4-9_006_+_160650493_spCas9 | GCUGCUAAAAUUAAAACAGA | 1560 |
| ABE_NGA_20 nt_3-9_005_+_160586439_spCas9 | GCUUCUUACCUUCUUCAGAA | 1561 |
| CBE_NGA_20 nt_4-9_006_+_160586439_spCas9 | GCUUCUUACCUUCUUCAGAA | 1562 |
| CBE_NGG_20 nt_4-9_003_−_160589682_spCas9 | GGAGCAAAGCCCCACAGUCC | 1563 |
| CBE_NGG_20 nt_4-9_003_−_160594087_spCas9 | GGAGCAAAGCCCCGGGGUCC | 1564 |
| CBE_NGA_20 nt_4-9_006_+_160542803_spCas9 | GGAUGCUGUGGCACAAGGUG | 1565 |
| CBE_NGC_20 nt_4-9_009_+_160600971_spCas9 | GGCAGUCCAUUCUGCAUCUG | 1566 |
| ABE_NGG_20 nt_3-9_002_+_160606466_spCas9 | GGCUCCUUACCUUGUUCAGA | 1567 |
| ABE_NGG_20 nt_3-9_002_+_160586438_spCas9 | GGCUUCUUACCUUCUUCAGA | 1568 |
| CBE_NGG_20 nt_4-9_003_−_160585162_spCas9 | GGGGUCCAGGACUGCUACCG | 1569 |
| CBE_NGA_20 nt_4-9_006_−_160605161_spCas9 | GGGUGCAGGAGUGCUACCAC | 1570 |
| CBE_NGA_20 nt_4-9_006_+_160605201_spCas9 | GGUGCUGAAAUGAAAAGAAA | 1571 |
| CBE_NGA_20 nt_4-9_006_+_160650490_spCas9 | GGUGCUGCUAAAAUUAAAAC | 1572 |
| CBE_NGG_20 nt_4-9_003_+_160531884_spCas9 | GUCACCCUAAACAGAGGUAG | 1573 |
| CBE_NGA_20 nt_4-9_006_+_160599652_spCas9 | GUCAGUGCUGAAAUUAAAAC | 1574 |
| CBE_NGG_20 nt_4-9_003_−_160548494_spCas9 | GUCAUCCAGGUUCCAAGCCU | 1575 |
| CBE_NGA_20 nt_4-9_006_−_160585159_spCas9 | GUCCAGGACUGCUACCGAGG | 1576 |
| CBE_NGC_20 nt_4-9_009_+_160591044_spCas9 | UAACACCAAGGACUAAUCUC | 1577 |
| CBE_NGG_20 nt_4-9_003_+_160601041_spCas9 | UAACACCAAGGGGCUGCCAC | 1578 |
| CBE_NGA_20 nt_4-9_006_+_160557514_spCas9 | UAACACCAGGGUUGUUUCCC | 1579 |
| ABE_NGA_20 nt_3-9_005_−_160537943_spCas9 | UACAGGCCUGCCGUCAUCAC | 1580 |
| CBE_NGA_20 nt_4-9_006_+_160531885_spCas9 | UCACCCUAAACAGAGGUAGG | 1581 |
| CBE_NGG_20 nt_4-9_003_−_160548493_spCas9 | UCAUCCAGGUUCCAAGCCUA | 1582 |
| CBE_NGG_20 nt_4-9_003_−_160578507_spCas9 | UGAACAAGGUAAGAAAUUUG | 1583 |
| CBE_NGG_20 nt_4-9_003_−_160590928_spCas9 | UGAACAAGGUAAGAAGUCUC | 1584 |
| CBE_NGG_20 nt_4-9_003_−_160606461_spCas9 | UGAACAAGGUAAGGAGCCUG | 1585 |
| CBE_NGG_20 nt_4-9_003_−_160650467_spCas9 | UGAGCAAAGCCAUGUGGUCC | 1586 |
| CBE_NGC_20 nt_4-9_009_−_160601056_spCas9 | UGCCGAAAUCCAGAUCCUGU | 1587 |
| CBE_NGG_20 nt_4-9_003_+_160531883_spCas9 | UGUCACCCUAAACAGAGGUA | 1588 |
| ABE_NGC_20 nt_3-9_008_−_160531874_spCas9 | UGUUUAGGGUGACAGUGGAG | 1589 |
| ABE_NGA_20 nt_3-9_005_−_160599646_spCas9 | UUAAUUUCAGCACUGACUGA | 1590 |
| ABE_NGC_20 nt_3-9_008_+_160595346_spCas9 | UUCCUACCUUCUUCAGAAGA | 1591 |
| CBE_NGC_20 nt_4-9_009_+_160595346_spCas9 | UUCCUACCUUCUUCAGAAGA | 1592 |
| ABE_NGA_20 nt_3-9_005_−_160547922_spCas9 | UUCUACAGACUGUAUGUUUG | 1593 |
| ABE_NGC_20 nt_3-9_008_+_160557382_spCas9 | UUCUUACCUGCUUCAGAAUG | 1594 |
| CBE_NGC_20 nt_4-9_009_+_160557382_spCas9 | UUCUUACCUGCUUCAGAAUG | 1595 |
| ABE_NGC_20 nt_3-9_008_+_160600909_spCas9 | UUCUUACCUUGUUCAAAAAA | 1596 |
| CBE_NGC_20 nt_4-9_009_+_160600909_spCas9 | UUCUUACCUUGUUCAAAAAA | 1597 |
| CBE_NGC_20 nt_4-9_009_−_160600902_spCas9 | UUGAACAAGGUAAGAAGUUG | 1598 |
| ABE_NGC_20 nt_3-9_008_−_160585188_spCas9 | UUUCAGCACCAACUGAAAAC | 1599 |
| ABE_NGC_20 nt_3-9_008_−_160577278_spCas9 | UUUCAGCACCACCUGAGAAA | 1600 |
| ABE_NGG_20 nt_3-9_002_−_160547923_spCas9 | UUUCUACAGACUGUAUGUUU | 1601 |
| ABE_NGC_20 nt_3-9_008_−_160650480_spCas9 | UUUUAGCAGCACCUGAGCAA | 1602 |
| ABE_NGG_20 nt_3-9_002_−_160547924_spCas9 | UUUUCUACAGACUGUAUGUU | 1603 |

TABLE 1C-1
Exemplary guide polynucleotide sequences for use in targeting a base editor to
disrupt a promoter region of an LPA polynucleotide.

| | | SEQ |
|---|---|---|
| Guide Name | Guide Polynucleotide Sequence | ID NO |
| ABE_NNNRRT_21 nt_5- | mUsmAsmUsUUUAUAAGACUCUAUAUUGUUUUAGUACUCU | 1604 |
| 14_014_−_ | GUAAUGAAAAUUACAGAAUCUACUAAAACAAGGCAAAAUG | |
| 160664368_saCas9 | CCGUGUUUAUCUCGUCAACUUGUUGGCGAGAUsmUsmUsm | |
| | U | |
| CBE_NNNRRT_21 nt_3- | mUsmAsmUsUUUAUAAGACUCUAUAUUGUUUUAGUACUCU | 1605 |
| 12_015_−_ | GUAAUGAAAAUUACAGAAUCUACUAAAACAAGGCAAAAUG | |
| 160664368_saCas9 | CCGUGUUUAUCUCGUCAACUUGUUGGCGAGAUsmUsmUsm | |
| | U | |
| ABE_NGG_20 nt_3-9_002_−_ | mAsmGsmGsCAAUGUGGAGCAGCUGAGUUUUAGAGCUAGA | 1606 |
| 160664446_spCas9 | AAUAGCAAGUUAAAAUAAGGCUAGUCCGUUAUCAACUUGA | |
| | AAAAGUGGCACCGAGUCGGUGCmUsmUsmUsU | |
| CBE_NGG_20 nt_4-9_003_−_ | mAsmGsmGsCAAUGUGGAGCAGCUGAGUUUUAGAGCUAGA | 1607 |
| 160664446_spCas9 | AAUAGCAAGUUAAAAUAAGGCUAGUCCGUUAUCAACUUGA | |
| | AAAAGUGGCACCGAGUCGGUGCmUsmUsmUsU | |
| CBE_NGC_20 nt_4- | mAsmUsmGsAUUCUCUCAGAGACCCAGUUUUAGAGCUAGA | 1608 |
| 9_009_+_160664319_spCas9 | AAUAGCAAGUUAAAAUAAGGCUAGUCCGUUAUCAACUUGA | |
| | AAAAGUGGCACCGAGUCGGUGCmUsmUsmUsU | |
| ABE_NGC_20 nt_3- | mAsmUsmGsAUUCUCUCAGAGACCCAGUUUUAGAGCUAGA | 1609 |
| 9_008_+_160664319_spCas9 | AAUAGCAAGUUAAAAUAAGGCUAGUCCGUUAUCAACUUGA | |
| | AAAAGUGGCACCGAGUCGGUGCmUsmUsmUsU | |
| ABE_NGG_20 nt_3-9_002_−_ | mGsmCsmAsAUGUGGAGCAGCUGAGGGUUUUAGAGCUAGA | 1610 |
| 160664444_spCas9 | AAUAGCAAGUUAAAAUAAGGCUAGUCCGUUAUCAACUUGA | |
| | AAAAGUGGCACCGAGUCGGUGCmUsmUsmUsU | |
| CBE_NGG_20 nt_4-9_003_−_ | mGsmCsmAsAUGUGGAGCAGCUGAGGGUUUUAGAGCUAGA | 1611 |
| 160664444_spCas9 | AAUAGCAAGUUAAAAUAAGGCUAGUCCGUUAUCAACUUGA | |
| | AAAAGUGGCACCGAGUCGGUGCmUsmUsmUsU | |
| CBE_NGA_20 nt_4-9_006_−_ | mGsmGsmAsGGAAACAAGACUAAUCAGUUUUAGAGCUAGA | 1612 |
| 160664512_spCas9 | AAUAGCAAGUUAAAAUAAGGCUAGUCCGUUAUCAACUUGA | |
| | AAAAGUGGCACCGAGUCGGUGCmUsmUsmUsU | |
| ABE_NGA_20 nt_3-9_005_−_ | mGsmGsmAsGGAAACAAGACUAAUCAGUUUUAGAGCUAGA | 1613 |
| 160664512_spCas9 | AAUAGCAAGUUAAAAUAAGGCUAGUCCGUUAUCAACUUGA | |
| | AAAAGUGGCACCGAGUCGGUGCmUsmUsmUsU | |
| ABE_NGG_20 nt_3-9_002_−_ | mAsmUsmCsAGGAAAGAUGAAGGUCUGUUUUAGAGCUAGA | 1614 |
| 160664496_spCas9 | AAUAGCAAGUUAAAAUAAGGCUAGUCCGUUAUCAACUUGA | |
| | AAAAGUGGCACCGAGUCGGUGCmUsmUsmUsU | |
| CBE_NGG_20 nt_4-9_003_−_ | mAsmUsmCsAGGAAAGAUGAAGGUCUGUUUUAGAGCUAGA | 1615 |
| 160664496_spCas9 | AAUAGCAAGUUAAAAUAAGGCUAGUCCGUUAUCAACUUGA | |
| | AAAAGUGGCACCGAGUCGGUGCmUsmUsmUsU | |
| ABE_NGG_20 nt_3-9_002_−_ | mAsmAsmUsUUGACUAUCUGGUUUGUGUUUUAGAGCUAGA | 1616 |
| 160664290_spCas9 | AAUAGCAAGUUAAAAUAAGGCUAGUCCGUUAUCAACUUGA | |
| | AAAAGUGGCACCGAGUCGGUGCmUsmUsmUsU | |
| CBE_NGG_20 nt_4-9_003_−_ | mAsmAsmUsUUGACUAUCUGGUUUGUGUUUUAGAGCUAGA | 1617 |
| 160664290_spCas9 | AAUAGCAAGUUAAAAUAAGGCUAGUCCGUUAUCAACUUGA | |
| | AAAAGUGGCACCGAGUCGGUGCmUsmUsmUsU | |
| ABE_NGG_20 nt_3-9_002_−_ | mUsmCsmAsGGAAAGAUGAAGGUCUAGUUUUAGAGCUAGA | 1618 |
| 160664495_spCas9 | AAUAGCAAGUUAAAAUAAGGCUAGUCCGUUAUCAACUUGA | |
| | AAAAGUGGCACCGAGUCGGUGCmUsmUsmUsU | |
| CBE_NGG_20 nt_4-9_003_−_ | mUsmCsmAsGGAAAGAUGAAGGUCUAGUUUUAGAGCUAGA | 1619 |
| 160664495_spCas9 | AAUAGCAAGUUAAAAUAAGGCUAGUCCGUUAUCAACUUGA | |
| | AAAAGUGGCACCGAGUCGGUGCmUsmUsmUsU | |
| CBE_NGC_20 nt_4- | mAsmAsmGsCCAUUUCCCCCCUCAGCGUUUUAGAGCUAGA | 1620 |
| 9_009_+_160664434_spCas9 | AAUAGCAAGUUAAAAUAAGGCUAGUCCGUUAUCAACUUGA | |
| | AAAAGUGGCACCGAGUCGGUGCmUsmUsmUsU | |
| ABE_NGC_20 nt_3- | mAsmAsmGsCCAUUUCCCCCCUCAGCGUUUUAGAGCUAGA | 1621 |
| 9_008_+_160664434_spCas9 | AAUAGCAAGUUAAAAUAAGGCUAGUCCGUUAUCAACUUGA | |
| | AAAAGUGGCACCGAGUCGGUGCmUsmUsmUsU | |
| ABE_NNNRRT_21 nt_5- | mGsmAsmAsGGAGUAAGGAGACAUAAAGUUUUAGUACUCU | 1622 |
| 14_014_−_ | GUAAUGAAAAUUACAGAAUCUACUAAAACAAGGCAAAAUG | |
| 160664462_saCas9 | CCGUGUUUAUCUCGUCAACUUGUUGGCGAGAUsmUsmUsm | |
| | U | |
| CBE_NNNRRT_21 nt_3- | mGsmAsmAsGGAGUAAGGAGACAUAAAGUUUUAGUACUCU | 1623 |
| 12_015_−_ | GUAAUGAAAAUUACAGAAUCUACUAAAACAAGGCAAAAUG | |
| 160664462_saCas9 | CCGUGUUUAUCUCGUCAACUUGUUGGCGAGAUsmUsmUsm | |
| | U | |
| ABE_NGG_20 nt_3-9_002_−_ | mCsmAsmGsGAAAGAUGAAGGUCUAGGUUUUAGAGCUAGA | 1624 |
| 160664494_spCas9 | AAUAGCAAGUUAAAAUAAGGCUAGUCCGUUAUCAACUUGA | |
| | AAAAGUGGCACCGAGUCGGUGCmUsmUsmUsU | |
| CBE_NGG_20 nt_4-9_003_−_ | mCsmAsmGsGAAAGAUGAAGGUCUAGGUUUUAGAGCUAGA | 1625 |
| 160664494_spCas9 | AAUAGCAAGUUAAAAUAAGGCUAGUCCGUUAUCAACUUGA | |
| | AAAAGUGGCACCGAGUCGGUGCmUsmUsmUsU | |
| ABE_NGG_20 nt_3-9_002_−_ | mUsmAsmAsUUUGACUAUCUGGUUUGGUUUUAGAGCUAGA | 1626 |
| 160664291_spCas9 | AAUAGCAAGUUAAAAUAAGGCUAGUCCGUUAUCAACUUGA | |
| | AAAAGUGGCACCGAGUCGGUGCmUsmUsmUsU | |
| CBE_NGG_20 nt_4-9_003_−_ | mUsmAsmAsUUUGACUAUCUGGUUUGGUUUUAGAGCUAGA | 1627 |
| 160664291_spCas9 | AAUAGCAAGUUAAAAUAAGGCUAGUCCGUUAUCAACUUGA | |
| | AAAAGUGGCACCGAGUCGGUGCmUsmUsmUsU | |
| ABE_NNGRRT_21 nt_5- | mUsmUsmUsUAUUUUAUCCAAAAGAAAGUUUUAGUACUCU | 1628 |
| 14_011_−_ | GUAAUGAAAAUUACAGAAUCUACUAAAACAAGGCAAAAUG | |
| 160664546_saCas9 | CCGUGUUUAUCUCGUCAACUUGUUGGCGAGAUsmUsmUsm | |
| | U | |
| CBE_NNGRRT_21 nt_3- | mUsmUsmUsUAUUUUAUCCAAAAGAAAGUUUUAGUACUCU | 1629 |
| 12_012_−_ | GUAAUGAAAAUUACAGAAUCUACUAAAACAAGGCAAAAUG | |
| 160664546_saCas9 | CCGUGUUUAUCUCGUCAACUUGUUGGCGAGAUsmUsmUsm | |
| | U | |
| CBE_NGC_20 nt_4-9_009_−_ | mUsmUsmGsACUAUCUGGUUUGUGGGGUUUUAGAGCUAGA | 1630 |
| 160664287_spCas9 | AAUAGCAAGUUAAAAUAAGGCUAGUCCGUUAUCAACUUGA | |
| | AAAAGUGGCACCGAGUCGGUGCmUsmUsmUsU | |
| ABE_NGC_20 nt_3-9_008_−_ | mUsmUsmGsACUAUCUGGUUUGUGGGGUUUUAGAGCUAGA | 1631 |
| 160664287_spCas9 | AAUAGCAAGUUAAAAUAAGGCUAGUCCGUUAUCAACUUGA | |
| | AAAAGUGGCACCGAGUCGGUGCmUsmUsmUsU | |
| CBE_NGA_20 nt_4- | mUsmAsmAsGUUAAUGAUUCUCUCAGGUUUUAGAGCUAGA | 1632 |
| 9_006_+_160664312_spCas9 | AAUAGCAAGUUAAAAUAAGGCUAGUCCGUUAUCAACUUGA | |
| | AAAAGUGGCACCGAGUCGGUGCmUsmUsmUsU | |
| ABE_NGA_20 nt_3- | mUsmAsmAsGUUAAUGAUUCUCUCAGGUUUUAGAGCUAGA | 1633 |
| 9_005_+_160664312_spCas9 | AAUAGCAAGUUAAAAUAAGGCUAGUCCGUUAUCAACUUGA | |
| | AAAAGUGGCACCGAGUCGGUGCmUsmUsmUsU | |
| CBE_NGC_20 nt_4- | mGsmAsmGsAGUGCAAUGUCAAUAGAGUUUUAGAGCUAGA | 1634 |
| 9_009_+_160664398_spCas9 | AAUAGCAAGUUAAAAUAAGGCUAGUCCGUUAUCAACUUGA | |
| | AAAAGUGGCACCGAGUCGGUGCmUsmUsmUSU | |
| ABE_NGC_20 nt_3- | mGsmAsmGsAGUGCAAUGUCAAUAGAGUUUUAGAGCUAGA | 1635 |
| 9_008_+_160664398_spCas9 | AAUAGCAAGUUAAAAUAAGGCUAGUCCGUUAUCAACUUGA | |
| | AAAAGUGGCACCGAGUCGGUGCmUsmUsmUsU | |
| ABE_NGG_20 nt_3- | mUsmGsmUsCAAUAGAUGCUGGGAAGGUUUUAGAGCUAGA | 1636 |
| 9_002_+_160664408_spCas9 | AAUAGCAAGUUAAAAUAAGGCUAGUCCGUUAUCAACUUGA | |
| | AAAAGUGGCACCGAGUCGGUGCmUsmUsmUsU | |
| CBE_NGG_20 nt_4- | mUsmGsmUsCAAUAGAUGCUGGGAAGGUUUUAGAGCUAGA | 1637 |
| 9_003_+_160664408_spCas9 | AAUAGCAAGUUAAAAUAAGGCUAGUCCGUUAUCAACUUGA | |
| | AAAAGUGGCACCGAGUCGGUGCmUsmUsmUsU | |
| ABE_NGG_20 nt_3-9_002_−_ | mAsmCsmCsCUGCUGAGCCAGUGGCAGUUUUAGAGCUAGA | 1638 |
| 160664336_spCas9 | AAUAGCAAGUUAAAAUAAGGCUAGUCCGUUAUCAACUUGA | |
| | AAAAGUGGCACCGAGUCGGUGCmUsmUsmUsU | |
| CBE_NGG_20 nt_4-9_003_−_ | mAsmCsmCsCUGCUGAGCCAGUGGCAGUUUUAGAGCUAGA | 1639 |
| 160664336_spCas9 | AAUAGCAAGUUAAAAUAAGGCUAGUCCGUUAUCAACUUGA | |
| | AAAAGUGGCACCGAGUCGGUGCmUsmUsmUsU | |
| CBE_NGC_20 nt_4-9_009_−_ | mUsmCsmAsAGGUAAUGUUUGAACCCGUUUUAGAGCUAGA | 1640 |
| 160664352_spCas9 | AAUAGCAAGUUAAAAUAAGGCUAGUCCGUUAUCAACUUGA | |
| | AAAAGUGGCACCGAGUCGGUGCmUsmUsmUsU | |
| ABE_NGC_20 nt_3-9_008_−_ | mUsmCsmAsAGGUAAUGUUUGAACCCGUUUUAGAGCUAGA | 1641 |
| 160664352_spCas9 | AAUAGCAAGUUAAAAUAAGGCUAGUCCGUUAUCAACUUGA | |
| | AAAAGUGGCACCGAGUCGGUGCmUsmUsmUsU | |
| CBE_NGA_20 nt_4-9_006_−_ | mGsmAsmAsAGAUGAAGGUCUAGGGGGUUUUAGAGCUAGA | 1642 |
| 160664491_spCas9 | AAUAGCAAGUUAAAAUAAGGCUAGUCCGUUAUCAACUUGA | |
| | AAAAGUGGCACCGAGUCGGUGCmUsmUsmUsU | |
| ABE_NGA_20 nt_3-9_005_−_ | mGsmAsmAsAGAUGAAGGUCUAGGGGGUUUUAGAGCUAGA | 1643 |
| 160664491_spCas9 | AAUAGCAAGUUAAAAUAAGGCUAGUCCGUUAUCAACUUGA | |
| | AAAAGUGGCACCGAGUCGGUGCmUsmUsmUsU | |
| ABE_NGG_20 nt_3-9_002_−_ | mAsmAsmGsAUGAAGGUCUAGGGGUGGUUUUAGAGCUAGA | 1644 |
| 160664489_spCas9 | AAUAGCAAGUUAAAAUAAGGCUAGUCCGUUAUCAACUUGA | |
| | AAAAGUGGCACCGAGUCGGUGCmUsmUsmUsU | |
| CBE_NGG_20 nt_4-9_003_−_ | mAsmAsmGsAUGAAGGUCUAGGGGUGGUUUUAGAGCUAGA | 1645 |
| 160664489_spCas9 | AAUAGCAAGUUAAAAUAAGGCUAGUCCGUUAUCAACUUGA | |
| | AAAAGUGGCACCGAGUCGGUGCmUsmUsmUsU | |
| ABE_NNNRRT_21 nt_5- | mUsmAsmAsAAUAUUUGAGAGUGCAAUGUUUUAGUACUCU | 1646 |
| 14_014_+_160664388_saCas | GUAAUGAAAAUUACAGAAUCUACUAAAACAAGGCAAAAUG | |
| 9 | CCGUGUUUAUCUCGUCAACUUGUUGGCGAGAUsmUsmUsm | |
| | U | |
| CBE_NNNRRT_21 nt_3- | mUsmAsmAsAAUAUUUGAGAGUGCAAUGUUUUAGUACUCU | 1647 |
| 12_015_+_160664388_saCas | GUAAUGAAAAUUACAGAAUCUACUAAAACAAGGCAAAAUG | |
| 9 | CCGUGUUUAUCUCGUCAACUUGUUGGCGAGAUsmUsmUsm | |
| | U | |
| ABE_NGG_20 nt_3-9_002_−_ | mGsmGsmGsAGGAAACAAGACUAAUCGUUUUAGAGCUAGA | 1648 |
| 160664513_spCas9 | AAUAGCAAGUUAAAAUAAGGCUAGUCCGUUAUCAACUUGA | |
| | AAAAGUGGCACCGAGUCGGUGCmUsmUsmUsU | |
| CBE_NGG_20 nt_4-9_003_−_ | mGsmGsmGsAGGAAACAAGACUAAUCGUUUUAGAGCUAGA | 1649 |
| 160664513_spCas9 | AAUAGCAAGUUAAAAUAAGGCUAGUCCGUUAUCAACUUGA | |
| | AAAAGUGGCACCGAGUCGGUGCmUsmUsmUsU | |
| ABE_NGG_20 nt_3- | mCsmCsmCsAUGCCACUGGCUCAGCAGUUUUAGAGCUAGA | 1650 |
| 9_002_+_160664335_spCas9 | AAUAGCAAGUUAAAAUAAGGCUAGUCCGUUAUCAACUUGA | |
| | AAAAGUGGCACCGAGUCGGUGCmUsmUsmUsU | |
| CBE_NGG_20 nt_4- | mCsmCsmCsAUGCCACUGGCUCAGCAGUUUUAGAGCUAGA | 1651 |
| 9_003_+_160664335_spCas9 | AAUAGCAAGUUAAAAUAAGGCUAGUCCGUUAUCAACUUGA | |
| | AAAAGUGGCACCGAGUCGGUGCmUsmUsmUsU | |
| CBE_NGA_20 nt_4- | mUsmGsmCsAAUGUCAAUAGAUGCUGGUUUUAGAGCUAGA | 1652 |
| 9_006_+_160664403_spCas9 | AAUAGCAAGUUAAAAUAAGGCUAGUCCGUUAUCAACUUGA | |
| | AAAAGUGGCACCGAGUCGGUGCmUsmUsmUsU | |
| ABE_NGA_20 nt_3- | mUsmGsmCsAAUGUCAAUAGAUGCUGGUUUUAGAGCUAGA | 1653 |
| 9_005_+_160664403_spCas9 | AAUAGCAAGUUAAAAUAAGGCUAGUCCGUUAUCAACUUGA | |
| | AAAAGUGGCACCGAGUCGGUGCmUsmUsmUsU | |
| CBE_NGA_20 nt_4-9_006_−_ | mUsmAsmAsAGGCAAUGUGGAGCAGCGUUUUAGAGCUAGA | 1654 |
| 160664449_spCas9 | AAUAGCAAGUUAAAAUAAGGCUAGUCCGUUAUCAACUUGA | |
| | AAAAGUGGCACCGAGUCGGUGCmUsmUsmUsU | |
| ABE_NGA_20 nt_3-9_005_−_ | mUsmAsmAsAGGCAAUGUGGAGCAGCGUUUUAGAGCUAGA | 1655 |
| 160664449_spCas9 | AAUAGCAAGUUAAAAUAAGGCUAGUCCGUUAUCAACUUGA | |
| | AAAAGUGGCACCGAGUCGGUGCmUsmUsmUsU | |
| ABE_NNNRRT_21 nt_5- | mGsmUsmCsUUAUAAAAUAUUUGAGAGGUUUUAGUACUCU | 1656 |
| 14_014_+_160664382_saCas | GUAAUGAAAAUUACAGAAUCUACUAAAACAAGGCAAAAUG | |
| 9 | CCGUGUUUAUCUCGUCAACUUGUUGGCGAGAUsmUsmUsm | |
| | U | |
| CBE_NNNRRT_21 nt_3- | mGsmUsmCsUUAUAAAAUAUUUGAGAGGUUUUAGUACUCU | 1657 |
| 12_015_+_160664382_saCas | GUAAUGAAAAUUACAGAAUCUACUAAAACAAGGCAAAAUG | |
| 9 | CCGUGUUUAUCUCGUCAACUUGUUGGCGAGAUsmUsmUsm | |
| | U | |
| ABE_NGG_20 nt_3-9_002_−_ | mUsmUsmUsGAACCCUGCUGAGCCAGGUUUUAGAGCUAGA | 1658 |
| 160664341_spCas9 | AAUAGCAAGUUAAAAUAAGGCUAGUCCGUUAUCAACUUGA | |
| | AAAAGUGGCACCGAGUCGGUGCmUsmUsmUsU | |
| CBE_NGG_20 nt_4-9_003_−_ | mUsmUsmUsGAACCCUGCUGAGCCAGGUUUUAGAGCUAGA | 1659 |
| 160664341_spCas9 | AAUAGCAAGUUAAAAUAAGGCUAGUCCGUUAUCAACUUGA | |
| | AAAAGUGGCACCGAGUCGGUGCmUsmUsmUsU | |
| CBE_NGC_20 nt_4-9_009_−_ | mGsmUsmAsAUGUUUGAACCCUGCUGGUUUUAGAGCUAGA | 1660 |
| 160664347_spCas9 | AAUAGCAAGUUAAAAUAAGGCUAGUCCGUUAUCAACUUGA | |
| | AAAAGUGGCACCGAGUCGGUGCmUsmUsmUsU | |
| ABE_NGC_20 nt_3-9_008_−_ | mGsmUsmAsAUGUUUGAACCCUGCUGGUUUUAGAGCUAGA | 1661 |
| 160664347_spCas9 | AAUAGCAAGUUAAAAUAAGGCUAGUCCGUUAUCAACUUGA | |
| | AAAAGUGGCACCGAGUCGGUGCmUsmUsmUsU | |
| CBE_NGC_20 nt_4-9_009_−_ | mUsmUsmGsAACCCUGCUGAGCCAGUGUUUUAGAGCUAGA | 1662 |
| 160664340_spCas9 | AAUAGCAAGUUAAAAUAAGGCUAGUCCGUUAUCAACUUGA | |
| | AAAAGUGGCACCGAGUCGGUGCmUsmUsmUsU | |
| ABE_NGC_20 nt_3-9_008_−_ | mUsmUsmGsAACCCUGCUGAGCCAGUGUUUUAGAGCUAGA | 1663 |
| 160664340_spCas9 | AAUAGCAAGUUAAAAUAAGGCUAGUCCGUUAUCAACUUGA | |
| | AAAAGUGGCACCGAGUCGGUGCmUsmUsmUsU | |
| CBE_NGA_20 nt_4-9_006_−_ | mGsmCsmCsAGUGGCAUGGGUCUCUGGUUUUAGAGCUAGA | 1664 |
| 160664326_spCas9 | AAUAGCAAGUUAAAAUAAGGCUAGUCCGUUAUCAACUUGA | |
| | AAAAGUGGCACCGAGUCGGUGCmUsmUsmUsU | |
| ABE_NGA_20 nt_3-9_005_−_ | mGsmCsmCsAGUGGCAUGGGUCUCUGGUUUUAGAGCUAGA | 1665 |
| 160664326_spCas9 | AAUAGCAAGUUAAAAUAAGGCUAGUCCGUUAUCAACUUGA | |
| | AAAAGUGGCACCGAGUCGGUGCmUsmUsmUsU | |
| ABE_NNNRRT_21 nt_5- | mUsmUsmUsAUAAGACUCUAUAUUCAAGUUUUAGUACUCU | 1666 |
| 14_014_−_ | GUAAUGAAAAUUACAGAAUCUACUAAAACAAGGCAAAAUG | |
| 160664365_saCas9 | CCGUGUUUAUCUCGUCAACUUGUUGGCGAGAUsmUsmUsm | |
| | U | |
| CBE_NNNRRT_21 nt_3- | mUsmUsmUsAUAAGACUCUAUAUUCAAGUUUUAGUACUCU | 1667 |
| 12_015_−_ | GUAAUGAAAAUUACAGAAUCUACUAAAACAAGGCAAAAUG | |
| 160664365_saCas9 | CCGUGUUUAUCUCGUCAACUUGUUGGCGAGAUsmUsmUsm | |
| | U | |
| CBE_NGA_20 nt_4-9_006_−_ | mGsmAsmGsCCAGUGGCAUGGGUCUCGUUUUAGAGCUAGA | 1668 |
| 160664328_spCas9 | AAUAGCAAGUUAAAAUAAGGCUAGUCCGUUAUCAACUUGA | |
| | AAAAGUGGCACCGAGUCGGUGCmUsmUsmUsU | |
| ABE_NGA_20 nt_3-9_005_−_ | mGsmAsmGsCCAGUGGCAUGGGUCUCGUUUUAGAGCUAGA | 1669 |
| 160664328_spCas9 | AAUAGCAAGUUAAAAUAAGGCUAGUCCGUUAUCAACUUGA | |
| | AAAAGUGGCACCGAGUCGGUGCmUsmUsmUsU | |
| ABE_NNNRRT_21 nt_5- | mAsmUsmCsAUUAACUUAAUUUGACUAGUUUUAGUACUCU | 1670 |
| 14_014_−_ | GUAAUGAAAAUUACAGAAUCUACUAAAACAAGGCAAAAUG | |
| 160664297_saCas9 | CCGUGUUUAUCUCGUCAACUUGUUGGCGAGAUsmUsmUsm | |
| | U | |
| CBE_NNNRRT_21 nt_3- | mAsmUsmCsAUUAACUUAAUUUGACUAGUUUUAGUACUCU | 1671 |
| 12_015_−_ | GUAAUGAAAAUUACAGAAUCUACUAAAACAAGGCAAAAUG | |
| 160664297_saCas9 | CCGUGUUUAUCUCGUCAACUUGUUGGCGAGAUsmUsmUsm | |
| | U | |
| CBE_NGA_20 nt_4- | mCsmCsmCsUAGACCUUCAUCUUUCCGUUUUAGAGCUAGA | 1672 |
| 9_006_+_160664495_spCas9 | AAUAGCAAGUUAAAAUAAGGCUAGUCCGUUAUCAACUUGA | |
| | AAAAGUGGCACCGAGUCGGUGCmUsmUsmUsU | |
| ABE_NGA_20 nt_3- | mCsmCsmCsUAGACCUUCAUCUUUCCGUUUUAGAGCUAGA | 1673 |
| 9_005_+_160664495_spCas9 | AAUAGCAAGUUAAAAUAAGGCUAGUCCGUUAUCAACUUGA | |
| | AAAAGUGGCACCGAGUCGGUGCmUsmUsmUsU | |
| ABE_NNNRRT_21 nt_5- | mCsmAsmAsACCAGAUAGUCAAAUUAAGUUUUAGUACUCU | 1674 |
| 14_014_+_160664294_saCas | GUAAUGAAAAUUACAGAAUCUACUAAAACAAGGCAAAAUG | |
| 9 | CCGUGUUUAUCUCGUCAACUUGUUGGCGAGAUsmUsmUsm | |
| | U | |
| CBE_NNNRRT_21 nt_3- | mCsmAsmAsACCAGAUAGUCAAAUUAAGUUUUAGUACUCU | 1675 |
| 12_015_+_160664294_saCas | GUAAUGAAAAUUACAGAAUCUACUAAAACAAGGCAAAAUG | |
| 9 | CCGUGUUUAUCUCGUCAACUUGUUGGCGAGAUsmUsmUsm | |
| | U | |
| CBE_NGA_20 nt_4- | mUsmUsmUsGAGAGUGCAAUGUCAAUGUUUUAGAGCUAGA | 1676 |
| 9_006_+_160664395_spCas9 | AAUAGCAAGUUAAAAUAAGGCUAGUCCGUUAUCAACUUGA | |
| | AAAAGUGGCACCGAGUCGGUGCmUsmUsmUsU | |
| ABE_NGA_20 nt_3- | mUsmUsmUsGAGAGUGCAAUGUCAAUGUUUUAGAGCUAGA | 1677 |
| 9_005_+_160664395_spCas9 | AAUAGCAAGUUAAAAUAAGGCUAGUCCGUUAUCAACUUGA | |
| | AAAAGUGGCACCGAGUCGGUGCmUsmUsmUsU | |
| CBE_NGA_20 nt_4-9_006_−_ | mAsmGsmGsUAAUGUUUGAACCCUGCGUUUUAGAGCUAGA | 1678 |
| 160664349_spCas9 | AAUAGCAAGUUAAAAUAAGGCUAGUCCGUUAUCAACUUGA | |
| | AAAAGUGGCACCGAGUCGGUGCmUsmUsmUsU | |
| ABE_NGA_20 nt_3-9_005_−_ | mAsmGsmGsUAAUGUUUGAACCCUGCGUUUUAGAGCUAGA | 1679 |
| 160664349_spCas9 | AAUAGCAAGUUAAAAUAAGGCUAGUCCGUUAUCAACUUGA | |
| | AAAAGUGGCACCGAGUCGGUGCmUsmUsmUsU | |
| ABE_NGG_20 nt_3- | mAsmGsmUsGCAAUGUCAAUAGAUGCGUUUUAGAGCUAGA | 1680 |
| 9_002_+_160664401_spCas9 | AAUAGCAAGUUAAAAUAAGGCUAGUCCGUUAUCAACUUGA | |
| | AAAAGUGGCACCGAGUCGGUGCmUsmUsmUsU | |
| CBE_NGG_20 nt_4- | mAsmGsmUsGCAAUGUCAAUAGAUGCGUUUUAGAGCUAGA | 1681 |
| 9_003_+_160664401_spCas9 | AAUAGCAAGUUAAAAUAAGGCUAGUCCGUUAUCAACUUGA | |
| | AAAAGUGGCACCGAGUCGGUGCmUsmUsmUsU | |
| CBE_NGA_20 nt_4- | mGsmCsmAsGGGUUCAAACAUUACCUGUUUUAGAGCUAGA | 1682 |
| 9_006_+_160664352_spCas9 | AAUAGCAAGUUAAAAUAAGGCUAGUCCGUUAUCAACUUGA | |
| | AAAAGUGGCACCGAGUCGGUGCmUsmUsmUSU | |
| ABE_NGA_20 nt_3- | mGsmCsmAsGGGUUCAAACAUUACCUGUUUUAGAGCUAGA | 1683 |
| 9_005_+_160664352_spCas9 | AAUAGCAAGUUAAAAUAAGGCUAGUCCGUUAUCAACUUGA | |
| | AAAAGUGGCACCGAGUCGGUGCmUsmUsmUsU | |
| ABE_NNNRRT_21 nt_5- | mAsmCsmCsAGAUAGUCAAAUUAAGUUGUUUUAGUACUCU | 1684 |
| 14_014_+_160664297_saCas9 | GUAAUGAAAAUUACAGAAUCUACUAAAACAAGGCAAAAUG | |
| | CCGUGUUUAUCUCGUCAACUUGUUGGCGAGAUsmUsmUsm | |
| | U | |
| CBE_NNNRRT_21 nt_3- | mAsmCsmCsAGAUAGUCAAAUUAAGUUGUUUUAGUACUCU | 1685 |
| 12_015_+_160664297_saCas9 | GUAAUGAAAAUUACAGAAUCUACUAAAACAAGGCAAAAUG | |
| | CCGUGUUUAUCUCGUCAACUUGUUGGCGAGAUsmUsmUsm | |
| | U | |
| ABE_NNNRRT_21 nt_5- | mGsmAsmGsGAAACAAGACUAAUCAGGGUUUUAGUACUCU | 1686 |
| 14_014_−_ | GUAAUGAAAAUUACAGAAUCUACUAAAACAAGGCAAAAUG | |
| 160664507_saCas9 | CCGUGUUUAUCUCGUCAACUUGUUGGCGAGAUsmUsmUsm | |
| | U | |
| CBE_NNNRRT_21 nt_3- | mGsmAsmGsGAAACAAGACUAAUCAGGGUUUUAGUACUCU | 1687 |
| 12_015_−_ | GUAAUGAAAAUUACAGAAUCUACUAAAACAAGGCAAAAUG | |
| 160664507_saCas9 | CCGUGUUUAUCUCGUCAACUUGUUGGCGAGAUsmUsmUsm | |
| | U | |
| ABE_NNNRRT_21 nt_5- | mGsmGsmUsCUCUGAGAGAAUCAUUAAGUUUUAGUACUCU | 1688 |
| 14_014_−_ | GUAAUGAAAAUUACAGAAUCUACUAAAACAAGGCAAAAUG | |
| 160664310_saCas9 | CCGUGUUUAUCUCGUCAACUUGUUGGCGAGAUsmUsmUsm | |
| | U | |
| CBE_NNNRRT_21 nt_3- | mGsmGsmUsCUCUGAGAGAAUCAUUAAGUUUUAGUACUCU | 1689 |
| 12_015_−_ | GUAAUGAAAAUUACAGAAUCUACUAAAACAAGGCAAAAUG | |
| 160664310_saCas9 | CCGUGUUUAUCUCGUCAACUUGUUGGCGAGAUsmUsmUsm | |
| | U | |
| ABE_NNNRRT_21 nt_5- | mCsmCsmCsACAAACCAGAUAGUCAAAGUUUUAGUACUCU | 1690 |
| 14_014_+_160664290_saCas9 | GUAAUGAAAAUUACAGAAUCUACUAAAACAAGGCAAAAUG | |
| | CCGUGUUUAUCUCGUCAACUUGUUGGCGAGAUsmUsmUsm | |
| | U | |
| CBE_NNNRRT_21 nt_3- | mCsmCsmCsACAAACCAGAUAGUCAAAGUUUUAGUACUCU | 1691 |
| 12_015_+_160664290_saCas9 | GUAAUGAAAAUUACAGAAUCUACUAAAACAAGGCAAAAUG | |
| | CCGUGUUUAUCUCGUCAACUUGUUGGCGAGAUsmUsmUsm | |
| | U | |
| ABE_NNGRRT_21 nt_5- | mAsmUsmAsGAGUCUUAUAAAAUAUUUGUUUUAGUACUCU | 1692 |
| 14_011_+_160664377_saCas9 | GUAAUGAAAAUUACAGAAUCUACUAAAACAAGGCAAAAUG | |
| | CCGUGUUUAUCUCGUCAACUUGUUGGCGAGAUsmUsmUsm | |
| | U | |
| CBE_NNGRRT_21 nt_3- | mAsmUsmAsGAGUCUUAUAAAAUAUUUGUUUUAGUACUCU | 1693 |
| 12_012_+_160664377_saCas9 | GUAAUGAAAAUUACAGAAUCUACUAAAACAAGGCAAAAUG | |
| | CCGUGUUUAUCUCGUCAACUUGUUGGCGAGAUsmUsmUsm | |
| | U | |
| ABE_NNNRRT_21 nt_5- | mAsmUsmAsUUUGAGAGUGCAAUGUCAGUUUUAGUACUCU | 1694 |
| 14_014_+_160664392_saCas9 | GUAAUGAAAAUUACAGAAUCUACUAAAACAAGGCAAAAUG | |
| | CCGUGUUUAUCUCGUCAACUUGUUGGCGAGAUsmUsmUsm | |
| | U | |
| CBE_NNNRRT_21 nt_3- | mAsmUsmAsUUUGAGAGUGCAAUGUCAGUUUUAGUACUCU | 1695 |
| 12_015_+_160664392_saCas9 | GUAAUGAAAAUUACAGAAUCUACUAAAACAAGGCAAAAUG | |
| | CCGUGUUUAUCUCGUCAACUUGUUGGCGAGAUsmUsmUsm | |
| | U | |
| ABE_NNNRRT_21 nt_5- | mCsmAsmAsUGUCAAUAGAUGCUGGGAGUUUUAGUACUCU | 1696 |
| 14_014_+_160664405_saCas9 | GUAAUGAAAAUUACAGAAUCUACUAAAACAAGGCAAAAUG | |
| | CCGUGUUUAUCUCGUCAACUUGUUGGCGAGAUsmUsmUsm | |
| | U | |
| CBE_NNNRRT_21 nt_3- | mCsmAsmAsUGUCAAUAGAUGCUGGGAGUUUUAGUACUCU | 1697 |
| 12_015_+_160664405_saCas9 | GUAAUGAAAAUUACAGAAUCUACUAAAACAAGGCAAAAUG | |
| | CCGUGUUUAUCUCGUCAACUUGUUGGCGAGAUsmUsmUsm | |
| | U | |
| ABE_NNNRRT_21 nt_5- | mCsmAsmCsCCCUAGACCUUCAUCUUUGUUUUAGUACUCU | 1698 |
| 14_014_+_160664492_saCas9 | GUAAUGAAAAUUACAGAAUCUACUAAAACAAGGCAAAAUG | |
| | CCGUGUUUAUCUCGUCAACUUGUUGGCGAGAUsmUsmUsm | |
| | U | |
| CBE_NNNRRT_21 nt_3- | mCsmAsmCsCCCUAGACCUUCAUCUUUGUUUUAGUACUCU | 1699 |
| 12_015_+_160664492_saCas9 | GUAAUGAAAAUUACAGAAUCUACUAAAACAAGGCAAAAUG | |
| | CCGUGUUUAUCUCGUCAACUUGUUGGCGAGAUsmUsmUsm | |
| | U | |
| ABE_NNNRRT_21 nt_5- | mCsmCsmUsAGACCUUCAUCUUUCCUGGUUUUAGUACUCU | 1700 |
| 14_014_+_160664496_saCas9 | GUAAUGAAAAUUACAGAAUCUACUAAAACAAGGCAAAAUG | |
| | CCGUGUUUAUCUCGUCAACUUGUUGGCGAGAUsmUsmUsm | |
| | U | |
| CBE_NNNRRT_21 nt_3- | mCsmCsmUsAGACCUUCAUCUUUCCUGGUUUUAGUACUCU | 1701 |
| 12_015_+_160664496_saCas9 | GUAAUGAAAAUUACAGAAUCUACUAAAACAAGGCAAAAUG | |
| | CCGUGUUUAUCUCGUCAACUUGUUGGCGAGAUsmUsmUsm | |
| | U | |
| ABE_NNNRRT_21 nt_5- | mUsmAsmCsCUUGAAUAUAGAGUCUUAGUUUUAGUACUCU | 1702 |
| 14_014_+_160664367_saCas9 | GUAAUGAAAAUUACAGAAUCUACUAAAACAAGGCAAAAUG | |
| | CCGUGUUUAUCUCGUCAACUUGUUGGCGAGAUsmUsmUsm | |
| | U | |
| CBE_NNNRRT_21 nt_3- | mUsmAsmCsCUUGAAUAUAGAGUCUUAGUUUUAGUACUCU | 1703 |
| 12_015_+_160664367_saCas9 | GUAAUGAAAAUUACAGAAUCUACUAAAACAAGGCAAAAUG | |
| | CCGUGUUUAUCUCGUCAACUUGUUGGCGAGAUsmUsmUsm | |
| | U | |
| ABE_NNGRRT_21 nt_5- | mGsmAsmAsCCCUGCUGAGCCAGUGGCGUUUUAGUACUCU | 1704 |
| 14_011_−_ | GUAAUGAAAAUUACAGAAUCUACUAAAACAAGGCAAAAUG | |
| 160664334_saCas9 | CCGUGUUUAUCUCGUCAACUUGUUGGCGAGAUsmUsmUsm | |
| | U | |
| CBE_NNGRRT_21 nt_3- | mGsmAsmAsCCCUGCUGAGCCAGUGGCGUUUUAGUACUCU | 1705 |
| 12_012_−_ | GUAAUGAAAAUUACAGAAUCUACUAAAACAAGGCAAAAUG | |
| 160664334_saCas9 | CCGUGUUUAUCUCGUCAACUUGUUGGCGAGAUsmUsmUsm | |
| | U | |
| ABE_NNNRRT_21 nt_5- | mGsmUsmGsCAAUGUCAAUAGAUGCUGGUUUUAGUACUCU | 1706 |
| 14_014_+_160664402_saCas9 | GUAAUGAAAAUUACAGAAUCUACUAAAACAAGGCAAAAUG | |
| | CCGUGUUUAUCUCGUCAACUUGUUGGCGAGAUsmUsmUsm | |
| | U | |
| CBE_NNNRRT_21 nt_3- | mGsmUsmGsCAAUGUCAAUAGAUGCUGGUUUUAGUACUCU | 1707 |
| 12_015_+_160664402_saCas9 | GUAAUGAAAAUUACAGAAUCUACUAAAACAAGGCAAAAUG | |
| | CCGUGUUUAUCUCGUCAACUUGUUGGCGAGAUsmUsmUsm | |
| | U | |
| ABE_NNGRRT_21 nt_5- | mAsmAsmUsCAGGAAAGAUGAAGGUCUGUUUUAGUACUCU | 1708 |
| 14_011_−_ | GUAAUGAAAAUUACAGAAUCUACUAAAACAAGGCAAAAUG | |
| 160664493_saCas9 | CCGUGUUUAUCUCGUCAACUUGUUGGCGAGAUsmUsmUsm | |
| | U | |
| CBE_NNGRRT_21 nt_3- | mAsmAsmUsCAGGAAAGAUGAAGGUCUGUUUUAGUACUCU | 1709 |
| 12_012_−_ | GUAAUGAAAAUUACAGAAUCUACUAAAACAAGGCAAAAUG | |
| 160664493_saCas9 | CCGUGUUUAUCUCGUCAACUUGUUGGCGAGAUsmUsmUsm | |
| | U | |
| ABE_NNGRRT_21 nt_5- | mCsmUsmUsAAUUUGACUAUCUGGUUUGUUUUAGUACUCU | 1710 |
| 14_011_−_ | GUAAUGAAAAUUACAGAAUCUACUAAAACAAGGCAAAAUG | |
| 160664289_saCas9 | CCGUGUUUAUCUCGUCAACUUGUUGGCGAGAUsmUsmUsm | |
| | U | |
| CBE_NNGRRT_21 nt_3- | mCsmUsmUsAAUUUGACUAUCUGGUUUGUUUUAGUACUCU | 1711 |
| 12_012_−_ | GUAAUGAAAAUUACAGAAUCUACUAAAACAAGGCAAAAUG | |
| 160664289_saCas9 | CCGUGUUUAUCUCGUCAACUUGUUGGCGAGAUsmUsmUsm | |
| | U | |
| ABE_NNGRRT_21 nt_5- | mGsmUsmUsCAAACAUUACCUUGAAUAGUUUUAGUACUCU | 1712 |
| 14_011_+_160664357_saCas9 | GUAAUGAAAAUUACAGAAUCUACUAAAACAAGGCAAAAUG | |
| | CCGUGUUUAUCUCGUCAACUUGUUGGCGAGAUsmUsmUsm | |
| | U | |
| CBE_NNGRRT_21 nt_3- | mGsmUsmUsCAAACAUUACCUUGAAUAGUUUUAGUACUCU | 1713 |
| 12_012_+_160664357_saCas9 | GUAAUGAAAAUUACAGAAUCUACUAAAACAAGGCAAAAUG | |
| | CCGUGUUUAUCUCGUCAACUUGUUGGCGAGAUsmUsmUsm | |
| | U | |
| ABE_NNGRRT_21 nt_5- | mGsmCsmCsAGUGGCAUGGGUCUCUGAGUUUUAGUACUCU | 1714 |
| 14_011_−_ | GUAAUGAAAAUUACAGAAUCUACUAAAACAAGGCAAAAUG | |
| 160664322_saCas9 | CCGUGUUUAUCUCGUCAACUUGUUGGCGAGAUsmUsmUsm | |
| | U | |
| CBE_NNGRRT_21 nt_3- | mGsmCsmCsAGUGGCAUGGGUCUCUGAGUUUUAGUACUCU | 1715 |
| 12_012_−_ | GUAAUGAAAAUUACAGAAUCUACUAAAACAAGGCAAAAUG | |
| 160664322_saCas9 | CCGUGUUUAUCUCGUCAACUUGUUGGCGAGAUsmUsmUsm | |
| | U | |
| ABE_NNGRRT_21 nt_5- | mAsmGsmAsCCCAUGCCACUGGCUCAGGUUUUAGUACUCU | 1716 |
| 14_011_+_160664332_saCas9 | GUAAUGAAAAUUACAGAAUCUACUAAAACAAGGCAAAAUG | |
| | CCGUGUUUAUCUCGUCAACUUGUUGGCGAGAUsmUsmUsm | |
| | U | |
| CBE_NNGRRT_21 nt_3- | mAsmGsmAsCCCAUGCCACUGGCUCAGGUUUUAGUACUCU | 1717 |
| 12_012_+_160664332_saCas9 | GUAAUGAAAAUUACAGAAUCUACUAAAACAAGGCAAAAUG | |
| | CCGUGUUUAUCUCGUCAACUUGUUGGCGAGAUsmUsmUsm | |
| | U | |
| ABE_NNGRRT_21 nt_5- | mCsmAsmGsCAGGGUUCAAACAUUACCGUUUUAGUACUCU | 1718 |
| 14_011_+_160664350_saCas9 | GUAAUGAAAAUUACAGAAUCUACUAAAACAAGGCAAAAUG | |
| | CCGUGUUUAUCUCGUCAACUUGUUGGCGAGAUsmUsmUsm | |
| | U | |
| CBE_NNGRRT_21 nt_3- | mCsmAsmGsCAGGGUUCAAACAUUACCGUUUUAGUACUCU | 1719 |
| 12_012_+_160664350_saCas9 | GUAAUGAAAAUUACAGAAUCUACUAAAACAAGGCAAAAUG | |
| | CCGUGUUUAUCUCGUCAACUUGUUGGCGAGAUsmUsmUsm | |
| | U | |
| ABE_NNNRRT_21 nt_5- | mGsmCsmAsUCUAUUGACAUUGCACUCGUUUUAGUACUCU | 1720 |
| 14_014_−_ | GUAAUGAAAAUUACAGAAUCUACUAAAACAAGGCAAAAUG | |
| 160664394_saCas9 | CCGUGUUUAUCUCGUCAACUUGUUGGCGAGAUsmUsmUsm | |
| | U | |
| CBE_NNNRRT_21 nt_3- | mGsmCsmAsUCUAUUGACAUUGCACUCGUUUUAGUACUCU | 1721 |
| 12_015_−_ | GUAAUGAAAAUUACAGAAUCUACUAAAACAAGGCAAAAUG | |
| 160664394_saCas9 | CCGUGUUUAUCUCGUCAACUUGUUGGCGAGAUsmUsmUsm | |
| | U | |

| | Alternative | | | SEQ |
|---|---|---|---|---|
| Guide | Guide | Target Site | | ID |
| Name | Name | Name | Guide Polynucleotide Sequence | NO |
| gRNA3362- | gRNA3362 | TSBTx6221 | mUsmAsmUsUUUAUAAGACUCUAUAUUGUUUU | 1722 |
| 3053 | | | AGUACUCUGUAAUGAAAAUUACAGAAUCUACU | |
| | | | AAAACAAGGCAAAAUGCCGUGUUUAUCUCGUC | |
| | | | AACUUGUUGGCGAGAUsmUsmUsmU | |
| gRNA3363- | gRNA3363 | TSBTx6222 | mAsmGsmGsCAAUGUGGAGCAGCUGAGUUUUA | 1723 |
| 3054 | | | GAGCUAGAAAUAGCAAGUUAAAAUAAGGCUAG | |
| | | | UCCGUUAUCAACUUGAAAAAGUGGCACCGAGU | |
| | | | CGGUGCmUsmUsmUsU | |
| gRNA3364- | gRNA3364 | TSBTx6223 | mAsmUsmGsAUUCUCUCAGAGACCCAGUUUUA | 1724 |
| 3055 | | | GAGCUAGAAAUAGCAAGUUAAAAUAAGGCUAG | |
| | | | UCCGUUAUCAACUUGAAAAAGUGGCACCGAGU | |
| | | | CGGUGCmUsmUsmUsU | |
| gRNA3365- | gRNA3365 | TSBTx6224 | mGsmCsmAsAUGUGGAGCAGCUGAGGGUUUUA | 1725 |
| 3056 | | | GAGCUAGAAAUAGCAAGUUAAAAUAAGGCUAG | |
| | | | UCCGUUAUCAACUUGAAAAAGUGGCACCGAGU | |
| | | | CGGUGCmUsmUsmUsU | |
| gRNA3366- | gRNA3366 | TSBTx6225 | mGsmGsmAsGGAAACAAGACUAAUCAGUUUUA | 1726 |
| 3057 | | | GAGCUAGAAAUAGCAAGUUAAAAUAAGGCUAG | |
| | | | UCCGUUAUCAACUUGAAAAAGUGGCACCGAGU | |
| | | | CGGUGCmUsmUsmUsU | |
| gRNA3367- | gRNA3367 | TSBTx6226 | mAsmUsmCsAGGAAAGAUGAAGGUCUGUUUUA | 1727 |
| 3058 | | | GAGCUAGAAAUAGCAAGUUAAAAUAAGGCUAG | |
| | | | UCCGUUAUCAACUUGAAAAAGUGGCACCGAGU | |
| | | | CGGUGCmUsmUsmUsU | |
| gRNA3368- | gRNA3368 | TSBTx6227 | mAsmAsmUsUUGACUAUCUGGUUUGUGUUUUA | 1728 |
| 3059 | | | GAGCUAGAAAUAGCAAGUUAAAAUAAGGCUAG | |
| | | | UCCGUUAUCAACUUGAAAAAGUGGCACCGAGU | |
| | | | CGGUGCmUsmUsmUsU | |
| gRNA3369- | gRNA3369 | TSBTx6228 | mUsmCsmAsGGAAAGAUGAAGGUCUAGUUUUA | 1729 |
| 3060 | | | GAGCUAGAAAUAGCAAGUUAAAAUAAGGCUAG | |
| | | | UCCGUUAUCAACUUGAAAAAGUGGCACCGAGU | |
| | | | CGGUGCmUsmUsmUsU | |
| gRNA3370- | gRNA3370 | TSBTx6229 | mAsmAsmGsCCAUUUCCCCCCUCAGCGUUUUA | 1730 |
| 3061 | | | GAGCUAGAAAUAGCAAGUUAAAAUAAGGCUAG | |
| | | | UCCGUUAUCAACUUGAAAAAGUGGCACCGAGU | |
| | | | CGGUGCmUsmUsmUsU | |
| gRNA3371- | gRNA3371 | TSBTx6230 | mGsmAsmAsGGAGUAAGGAGACAUAAAGUUUU | 1731 |
| 3062 | | | AGUACUCUGUAAUGAAAAUUACAGAAUCUACU | |
| | | | AAAACAAGGCAAAAUGCCGUGUUUAUCUCGUC | |
| | | | AACUUGUUGGCGAGAUsmUsmUsmU | |
| gRNA3372- | gRNA3372 | TSBTx6231 | mCsmAsmGsGAAAGAUGAAGGUCUAGGUUUUA | 1732 |
| 3063 | | | GAGCUAGAAAUAGCAAGUUAAAAUAAGGCUAG | |
| | | | UCCGUUAUCAACUUGAAAAAGUGGCACCGAGU | |
| | | | CGGUGCmUsmUsmUsU | |
| gRNA3373- | gRNA3373 | TSBTx6232 | mUsmAsmAsUUUGACUAUCUGGUUUGGUUUUA | 1733 |
| 3064 | | | GAGCUAGAAAUAGCAAGUUAAAAUAAGGCUAG | |
| | | | UCCGUUAUCAACUUGAAAAAGUGGCACCGAGU | |
| | | | CGGUGCmUsmUsmUsU | |
| gRNA3374- | gRNA3374 | TSBTx6233 | mUsmUsmUsUAUUUUAUCCAAAAGAAAGUUUU | 1734 |
| 3065 | | | AGUACUCUGUAAUGAAAAUUACAGAAUCUACU | |
| | | | AAAACAAGGCAAAAUGCCGUGUUUAUCUCGUC | |
| | | | AACUUGUUGGCGAGAUsmUsmUsmU | |
| gRNA3375- | gRNA3375 | TSBTx6234 | mUsmUsmGsACUAUCUGGUUUGUGGGGUUUUA | 1735 |
| 3066 | | | GAGCUAGAAAUAGCAAGUUAAAAUAAGGCUAG | |
| | | | UCCGUUAUCAACUUGAAAAAGUGGCACCGAGU | |
| | | | CGGUGCmUsmUsmUsU | |
| gRNA3376- | gRNA3376 | TSBTx6235 | mUsmAsmAsGUUAAUGAUUCUCUCAGGUUUUA | 1736 |
| 3067 | | | GAGCUAGAAAUAGCAAGUUAAAAUAAGGCUAG | |
| | | | UCCGUUAUCAACUUGAAAAAGUGGCACCGAGU | |
| | | | CGGUGCmUsmUsmUsU | |
| gRNA3377- | gRNA3377 | TSBTx6236 | mGsmAsmGsAGUGCAAUGUCAAUAGAGUUUUA | 1737 |
| 3068 | | | GAGCUAGAAAUAGCAAGUUAAAAUAAGGCUAG | |
| | | | UCCGUUAUCAACUUGAAAAAGUGGCACCGAGU | |
| | | | CGGUGCmUsmUsmUsU | |
| gRNA3378- | gRNA3378 | TSBTx6237 | mUsmGsmUsCAAUAGAUGCUGGGAAGGUUUUA | 1738 |
| 3069 | | | GAGCUAGAAAUAGCAAGUUAAAAUAAGGCUAG | |
| | | | UCCGUUAUCAACUUGAAAAAGUGGCACCGAGU | |
| | | | CGGUGCmUsmUsmUsU | |
| gRNA3379- | gRNA3379 | TSBTx6238 | mAsmCsmCsCUGCUGAGCCAGUGGCAGUUUUA | 1739 |
| 3070 | | | GAGCUAGAAAUAGCAAGUUAAAAUAAGGCUAG | |
| | | | UCCGUUAUCAACUUGAAAAAGUGGCACCGAGU | |
| | | | CGGUGCmUsmUsmUsU | |
| gRNA3380- | gRNA3380 | TSBTx6239 | mUsmCsmAsAGGUAAUGUUUGAACCCGUUUUA | 1740 |
| 3071 | | | GAGCUAGAAAUAGCAAGUUAAAAUAAGGCUAG | |
| | | | UCCGUUAUCAACUUGAAAAAGUGGCACCGAGU | |
| | | | CGGUGCmUsmUsmUsU | |
| gRNA3381- | gRNA3381 | TSBTx6240 | mGsmAsmAsAGAUGAAGGUCUAGGGGGUUUUA | 1741 |
| 3072 | | | GAGCUAGAAAUAGCAAGUUAAAAUAAGGCUAG | |
| | | | UCCGUUAUCAACUUGAAAAAGUGGCACCGAGU | |
| | | | CGGUGCmUsmUsmUsU | |
| gRNA3382- | gRNA3382 | TSBTx6241 | mAsmAsmGsAUGAAGGUCUAGGGGUGGUUUUA | 1742 |
| 3073 | | | GAGCUAGAAAUAGCAAGUUAAAAUAAGGCUAG | |
| | | | UCCGUUAUCAACUUGAAAAAGUGGCACCGAGU | |
| | | | CGGUGCmUsmUsmUsU | |
| gRNA3383- | gRNA3383 | TSBTx6242 | mUsmAsmAsAAUAUUUGAGAGUGCAAUGUUUU | 1743 |
| 3074 | | | AGUACUCUGUAAUGAAAAUUACAGAAUCUACU | |
| | | | AAAACAAGGCAAAAUGCCGUGUUUAUCUCGUC | |
| | | | AACUUGUUGGCGAGAUsmUsmUsmU | |
| gRNA3384- | gRNA3384 | TSBTx6243 | mGsmGsmGsAGGAAACAAGACUAAUCGUUUUA | 1744 |
| 3075 | | | GAGCUAGAAAUAGCAAGUUAAAAUAAGGCUAG | |
| | | | UCCGUUAUCAACUUGAAAAAGUGGCACCGAGU | |
| | | | CGGUGCmUsmUsmUsU | |
| gRNA3385- | gRNA3385 | TSBTx6244 | mCsmCsmCsAUGCCACUGGCUCAGCAGUUUUA | 1745 |
| 3076 | | | GAGCUAGAAAUAGCAAGUUAAAAUAAGGCUAG | |
| | | | UCCGUUAUCAACUUGAAAAAGUGGCACCGAGU | |
| | | | CGGUGCmUsmUsmUsU | |
| gRNA3386- | gRNA3386 | TSBTx6245 | mUsmGsmCsAAUGUCAAUAGAUGCUGGUUUUA | 1746 |
| 3077 | | | GAGCUAGAAAUAGCAAGUUAAAAUAAGGCUAG | |
| | | | UCCGUUAUCAACUUGAAAAAGUGGCACCGAGU | |
| | | | CGGUGCmUsmUsmUsU | |
| gRNA3387- | gRNA3387 | TSBTx6246 | mUsmAsmAsAGGCAAUGUGGAGCAGCGUUUUA | 1747 |
| 3078 | | | GAGCUAGAAAUAGCAAGUUAAAAUAAGGCUAG | |
| | | | UCCGUUAUCAACUUGAAAAAGUGGCACCGAGU | |
| | | | CGGUGCmUsmUsmUsU | |
| gRNA3388- | gRNA3388 | TSBTx6247 | mGsmUsmCsUUAUAAAAUAUUUGAGAGGUUUU | 1748 |
| 3079 | | | AGUACUCUGUAAUGAAAAUUACAGAAUCUACU | |
| | | | AAAACAAGGCAAAAUGCCGUGUUUAUCUCGUC | |
| | | | AACUUGUUGGCGAGAUsmUsmUsmU | |
| gRNA3389- | gRNA3389 | TSBTx6248 | mUsmUsmUsGAACCCUGCUGAGCCAGGUUUUA | 1749 |
| 3080 | | | GAGCUAGAAAUAGCAAGUUAAAAUAAGGCUAG | |
| | | | UCCGUUAUCAACUUGAAAAAGUGGCACCGAGU | |
| | | | CGGUGCmUsmUsmUsU | |
| gRNA3390- | gRNA3390 | TSBTx6249 | mGsmUsmAsAUGUUUGAACCCUGCUGGUUUUA | 1750 |
| 3081 | | | GAGCUAGAAAUAGCAAGUUAAAAUAAGGCUAG | |
| | | | UCCGUUAUCAACUUGAAAAAGUGGCACCGAGU | |
| | | | CGGUGCmUsmUsmUsU | |
| gRNA3391- | gRNA3391 | TSBTx6250 | mUsmUsmGsAACCCUGCUGAGCCAGUGUUUUA | 1751 |
| 3082 | | | GAGCUAGAAAUAGCAAGUUAAAAUAAGGCUAG | |
| | | | UCCGUUAUCAACUUGAAAAAGUGGCACCGAGU | |
| | | | CGGUGCmUsmUsmUsU | |
| gRNA3392- | gRNA3392 | TSBTx6251 | mGsmCsmCsAGUGGCAUGGGUCUCUGGUUUUA | 1752 |
| 3083 | | | GAGCUAGAAAUAGCAAGUUAAAAUAAGGCUAG | |
| | | | UCCGUUAUCAACUUGAAAAAGUGGCACCGAGU | |
| | | | CGGUGCmUsmUsmUsU | |
| gRNA3393- | gRNA3393 | TSBTx6252 | mUsmUsmUsAUAAGACUCUAUAUUCAAGUUUU | 1753 |
| 3084 | | | AGUACUCUGUAAUGAAAAUUACAGAAUCUACU | |
| | | | AAAACAAGGCAAAAUGCCGUGUUUAUCUCGUC | |
| | | | AACUUGUUGGCGAGAUsmUsmUsmU | |
| gRNA3394- | gRNA3394 | TSBTx6253 | mGsmAsmGsCCAGUGGCAUGGGUCUCGUUUUA | 1754 |
| 3085 | | | GAGCUAGAAAUAGCAAGUUAAAAUAAGGCUAG | |
| | | | UCCGUUAUCAACUUGAAAAAGUGGCACCGAGU | |
| | | | CGGUGCmUsmUsmUsU | |
| gRNA3395- | gRNA3395 | TSBTx6254 | mAsmUsmCsAUUAACUUAAUUUGACUAGUUUU | 1755 |
| 3086 | | | AGUACUCUGUAAUGAAAAUUACAGAAUCUACU | |
| | | | AAAACAAGGCAAAAUGCCGUGUUUAUCUCGUC | |
| | | | AACUUGUUGGCGAGAUsmUsmUsmU | |
| gRNA3396- | gRNA3396 | TSBTx6255 | mCsmCsmCsUAGACCUUCAUCUUUCCGUUUUA | 1756 |
| 3087 | | | GAGCUAGAAAUAGCAAGUUAAAAUAAGGCUAG | |
| | | | UCCGUUAUCAACUUGAAAAAGUGGCACCGAGU | |
| | | | CGGUGCmUsmUsmUsU | |
| gRNA3397- | gRNA3397 | TSBTx6256 | mCsmAsmAsACCAGAUAGUCAAAUUAAGUUUU | 1757 |
| 3088 | | | AGUACUCUGUAAUGAAAAUUACAGAAUCUACU | |
| | | | AAAACAAGGCAAAAUGCCGUGUUUAUCUCGUC | |
| | | | AACUUGUUGGCGAGAUsmUsmUsmU | |
| gRNA3398- | gRNA3398 | TSBTx6257 | mUsmUsmUsGAGAGUGCAAUGUCAAUGUUUUA | 1758 |
| 3089 | | | GAGCUAGAAAUAGCAAGUUAAAAUAAGGCUAG | |
| | | | UCCGUUAUCAACUUGAAAAAGUGGCACCGAGU | |
| | | | CGGUGCmUsmUsmUsU | |
| gRNA3399- | gRNA3399 | TSBTx6258 | mAsmGsmGsUAAUGUUUGAACCCUGCGUUUUA | 1759 |
| 3090 | | | GAGCUAGAAAUAGCAAGUUAAAAUAAGGCUAG | |
| | | | UCCGUUAUCAACUUGAAAAAGUGGCACCGAGU | |
| | | | CGGUGCmUsmUsmUsU | |
| gRNA3400- | gRNA3400 | TSBTx6259 | mAsmGsmUsGCAAUGUCAAUAGAUGCGUUUUA | 1760 |
| 3091 | | | GAGCUAGAAAUAGCAAGUUAAAAUAAGGCUAG | |
| | | | UCCGUUAUCAACUUGAAAAAGUGGCACCGAGU | |
| | | | CGGUGCmUsmUsmUsU | |
| gRNA3401- | gRNA3401 | TSBTx6260 | mGsmCsmAsGGGUUCAAACAUUACCUGUUUUA | 1761 |
| 3092 | | | GAGCUAGAAAUAGCAAGUUAAAAUAAGGCUAG | |
| | | | UCCGUUAUCAACUUGAAAAAGUGGCACCGAGU | |
| | | | CGGUGCmUsmUsmUsU | |
| gRNA3402- | gRNA3402 | TSBTx6261 | mAsmCsmCsAGAUAGUCAAAUUAAGUUGUUUU | 1762 |
| 3093 | | | AGUACUCUGUAAUGAAAAUUACAGAAUCUACU | |
| | | | AAAACAAGGCAAAAUGCCGUGUUUAUCUCGUC | |
| | | | AACUUGUUGGCGAGAUsmUsmUsmU | |
| gRNA3403- | gRNA3403 | TSBTx6262 | mGsmAsmGsGAAACAAGACUAAUCAGGGUUUU | 1763 |
| 3094 | | | AGUACUCUGUAAUGAAAAUUACAGAAUCUACU | |
| | | | AAAACAAGGCAAAAUGCCGUGUUUAUCUCGUC | |
| | | | AACUUGUUGGCGAGAUsmUsmUsmU | |
| gRNA3404- | gRNA3404 | TSBTx6263 | mGsmGsmUsCUCUGAGAGAAUCAUUAAGUUUU | 1764 |
| 3095 | | | AGUACUCUGUAAUGAAAAUUACAGAAUCUACU | |
| | | | AAAACAAGGCAAAAUGCCGUGUUUAUCUCGUC | |
| | | | AACUUGUUGGCGAGAUsmUsmUsmU | |
| gRNA3405- | gRNA3405 | TSBTx6264 | mCsmCsmCsACAAACCAGAUAGUCAAAGUUUU | 1765 |
| 3096 | | | AGUACUCUGUAAUGAAAAUUACAGAAUCUACU | |
| | | | AAAACAAGGCAAAAUGCCGUGUUUAUCUCGUC | |
| | | | AACUUGUUGGCGAGAUsmUsmUsmU | |
| gRNA3406- | gRNA3406 | TSBTx6265 | mAsmUsmAsGAGUCUUAUAAAAUAUUUGUUUU | 1766 |
| 3097 | | | AGUACUCUGUAAUGAAAAUUACAGAAUCUACU | |
| | | | AAAACAAGGCAAAAUGCCGUGUUUAUCUCGUC | |
| | | | AACUUGUUGGCGAGAUsmUsmUsmU | |
| gRNA3407- | gRNA3407 | TSBTx6266 | mAsmUsmAsUUUGAGAGUGCAAUGUCAGUUUU | 1767 |
| 3098 | | | AGUACUCUGUAAUGAAAAUUACAGAAUCUACU | |
| | | | AAAACAAGGCAAAAUGCCGUGUUUAUCUCGUC | |
| | | | AACUUGUUGGCGAGAUsmUsmUsmU | |
| gRNA3408- | gRNA3408 | TSBTx6267 | mCsmAsmAsUGUCAAUAGAUGCUGGGAGUUUU | 1768 |
| 3099 | | | AGUACUCUGUAAUGAAAAUUACAGAAUCUACU | |
| | | | AAAACAAGGCAAAAUGCCGUGUUUAUCUCGUC | |
| | | | AACUUGUUGGCGAGAUsmUsmUsmU | |
| gRNA3409- | gRNA3409 | TSBTx6268 | mCsmAsmCsCCCUAGACCUUCAUCUUUGUUUU | 1769 |
| 3100 | | | AGUACUCUGUAAUGAAAAUUACAGAAUCUACU | |
| | | | AAAACAAGGCAAAAUGCCGUGUUUAUCUCGUC | |
| | | | AACUUGUUGGCGAGAUsmUsmUsmU | |
| gRNA3410- | gRNA3410 | TSBTx6269 | mCsmCsmUsAGACCUUCAUCUUUCCUGGUUUU | 1770 |
| 3101 | | | AGUACUCUGUAAUGAAAAUUACAGAAUCUACU | |
| | | | AAAACAAGGCAAAAUGCCGUGUUUAUCUCGUC | |
| | | | AACUUGUUGGCGAGAUsmUsmUsmU | |
| gRNA3411- | gRNA3411 | TSBTx6270 | mUsmAsmCsCUUGAAUAUAGAGUCUUAGUUUU | 1771 |
| 3102 | | | AGUACUCUGUAAUGAAAAUUACAGAAUCUACU | |
| | | | AAAACAAGGCAAAAUGCCGUGUUUAUCUCGUC | |
| | | | AACUUGUUGGCGAGAUsmUsmUsmU | |
| gRNA3412- | gRNA3412 | TSBTx6271 | mGsmAsmAsCCCUGCUGAGCCAGUGGCGUUUU | 1772 |
| 3103 | | | AGUACUCUGUAAUGAAAAUUACAGAAUCUACU | |
| | | | AAAACAAGGCAAAAUGCCGUGUUUAUCUCGUC | |
| | | | AACUUGUUGGCGAGAUsmUsmUsmU | |
| gRNA3413- | gRNA3413 | TSBTx6272 | mGsmUsmGsCAAUGUCAAUAGAUGCUGGUUUU | 1773 |
| 3104 | | | AGUACUCUGUAAUGAAAAUUACAGAAUCUACU | |
| | | | AAAACAAGGCAAAAUGCCGUGUUUAUCUCGUC | |
| | | | AACUUGUUGGCGAGAUsmUsmUsmU | |
| gRNA3414- | gRNA3414 | TSBTx6273 | mAsmAsmUsCAGGAAAGAUGAAGGUCUGUUUU | 1774 |
| 3105 | | | AGUACUCUGUAAUGAAAAUUACAGAAUCUACU | |
| | | | AAAACAAGGCAAAAUGCCGUGUUUAUCUCGUC | |
| | | | AACUUGUUGGCGAGAUsmUsmUsmU | |
| gRNA3415- | gRNA3415 | TSBTx6274 | mCsmUsmUsAAUUUGACUAUCUGGUUUGUUUU | 1775 |
| 3106 | | | AGUACUCUGUAAUGAAAAUUACAGAAUCUACU | |
| | | | AAAACAAGGCAAAAUGCCGUGUUUAUCUCGUC | |
| | | | AACUUGUUGGCGAGAUsmUsmUsmU | |
| gRNA3416- | gRNA3416 | TSBTx6275 | mGsmUsmUsCAAACAUUACCUUGAAUAGUUUU | 1776 |
| 3107 | | | AGUACUCUGUAAUGAAAAUUACAGAAUCUACU | |
| | | | AAAACAAGGCAAAAUGCCGUGUUUAUCUCGUC | |
| | | | AACUUGUUGGCGAGAUsmUsmUsmU | |
| gRNA3417- | gRNA3417 | TSBTx6276 | mGsmCsmCsAGUGGCAUGGGUCUCUGAGUUUU | 1777 |
| 3108 | | | AGUACUCUGUAAUGAAAAUUACAGAAUCUACU | |
| | | | AAAACAAGGCAAAAUGCCGUGUUUAUCUCGUC | |
| | | | AACUUGUUGGCGAGAUsmUsmUsmU | |
| gRNA3418- | gRNA3418 | TSBTx6277 | mAsmGsmAsCCCAUGCCACUGGCUCAGGUUUU | 1778 |
| 3109 | | | AGUACUCUGUAAUGAAAAUUACAGAAUCUACU | |
| | | | AAAACAAGGCAAAAUGCCGUGUUUAUCUCGUC | |
| | | | AACUUGUUGGCGAGAUsmUsmUsmU | |
| gRNA3419- | gRNA3419 | TSBTx6278 | mCsmAsmGsCAGGGUUCAAACAUUACCGUUUU | 1779 |
| 3110 | | | AGUACUCUGUAAUGAAAAUUACAGAAUCUACU | |
| | | | AAAACAAGGCAAAAUGCCGUGUUUAUCUCGUC | |
| | | | AACUUGUUGGCGAGAUsmUsmUsmU | |
| gRNA3420- | gRNA3420 | TSBTx6279 | mGsmCsmAsUCUAUUGACAUUGCACUCGUUUU | 1780 |
| 3111 | | | AGUACUCUGUAAUGAAAAUUACAGAAUCUACU | |
| | | | AAAACAAGGCAAAAUGCCGUGUUUAUCUCGUC | |
| | | | AACUUGUUGGCGAGAUsmUsmUsmU | |
| sgRNA_088- | sgRNA_088 | TSBTx904 | mCsmAsmGsGAUCCGCACAGACUCCAGUUUUA | 1781 |
| 3327 | | | GAGCUAGAAAUAGCAAGUUAAAAUAAGGCUAG | |
| | | | UCCGUUAUCAACUUGAAAAAGUGGCACCGAGU | |
| | | | CGGUGCmUsmUsmUsU | |

TABLE 1C-2
Exemplary spacer sequences and their corresponding target sequences for use
in targeting a base editor to disrupt a promoter region of an LPA polynucleotide.

| | | | PAM | |
|---|---|---|---|---|
| | | | Sequence | PAM |
| Guide Name | Base Editor Name | napDNAbp | Family | Sequence |
| ABE_NNNRRT_21 nt_5-14_014_−_ | saCas9 KKH ABE | saCas9 | NNNRRT | CAAGGT |
| 160664368_saCas9 | | | | |
| CBE_NNNRRT_21 nt_3-12_015_−_ | saCas9 KKH CBE | saCas9 | NNNRRT | CAAGGT |
| 160664368_saCas9 | | | | |
| ABE_NGG_20 nt_3-9_002_−_ | spCas9 ABE | spCas9 | NGG | GGG |
| 160664446_spCas9 | | | | |
| CBE_NGG_20 nt_4-9_003_−_ | spCas9 CBE | spCas9 | NGG | GGG |
| 160664446_spCas9 | | | | |
| CBE_NGC_20 nt_4- | spCas9 NGC CBE | spCas9 | NGC | TGC |
| 9_009_+_160664319_spCas9 | | | | |
| ABE_NGC_20 nt_3- | spCas9 NGC ABE | spCas9 | NGC | TGC |
| 9_008_+_160664319_spCas9 | | | | |
| ABE_NGG_20 nt_3-9_002_−_ | spCas9 ABE | spCas9 | NGG | GGG |
| 160664444_spCas9 | | | | |
| CBE_NGG_20 nt_4-9_003_−_ | spCas9 CBE | spCas9 | NGG | GGG |
| 160664444_spCas9 | | | | |
| CBE_NGA_20 nt_4-9_006_−_ | spCas9 VRQR CBE | spCas9 | NGA | GGA |
| 160664512_spCas9 | | | | |
| ABE_NGA_20 nt_3-9_005_−_ | spCas9 VRQR ABE | spCas9 | NGA | GGA |
| 160664512_spCas9 | | | | |
| ABE_NGG_20 nt_3-9_002_−_ | spCas9 ABE | spCas9 | NGG | AGG |
| 160664496_spCas9 | | | | |
| CBE_NGG_20 nt_4-9_003_−_ | spCas9 CBE | spCas9 | NGG | AGG |
| 160664496_spCas9 | | | | |
| ABE_NGG_20 nt_3-9_002_−_ | spCas9 ABE | spCas9 | NGG | GGG |
| 160664290_spCas9 | | | | |
| CBE_NGG_20 nt_4-9_003_−_ | spCas9 CBE | spCas9 | NGG | GGG |
| 160664290_spCas9 | | | | |
| ABE_NGG_20 nt_3-9_002_−_ | spCas9 ABE | spCas9 | NGG | GGG |
| 160664495_spCas9 | | | | |
| CBE_NGG_20 nt_4-9_003_−_ | spCas9 CBE | spCas9 | NGG | GGG |
| 160664495_spCas9 | | | | |
| CBE_NGC_20 nt_4- | spCas9 NGC CBE | spCas9 | NGC | TGC |
| 9_009_+_160664434_spCas9 | | | | |
| ABE_NGC_20 nt_3- | spCas9 NGC ABE | spCas9 | NGC | TGC |
| 9_008_+_160664434_spCas9 | | | | |
| ABE_NNNRRT_21 nt_5-14_014_−_ | saCas9 KKH ABE | saCas9 | NNNRRT | GGCAAT |
| 160664462_saCas9 | | | | |
| CBE_NNNRRT_21 nt_3-12_015_−_ | saCas9 KKH CBE | saCas9 | NNNRRT | GGCAAT |
| 160664462_saCas9 | | | | |
| ABE_NGG_20 nt_3-9_002_−_ | spCas9 ABE | spCas9 | NGG | GGG |
| 160664494_spCas9 | | | | |
| CBE_NGG_20 nt_4-9_003_−_ | spCas9 CBE | spCas9 | NGG | GGG |
| 160664494_spCas9 | | | | |
| ABE_NGG_20 nt_3-9_002_−_ | spCas9 ABE | spCas9 | NGG | TGG |
| 160664291_spCas9 | | | | |
| CBE_NGG_20 nt_4-9_003_−_ | spCas9 CBE | spCas9 | NGG | TGG |
| 160664291_spCas9 | | | | |
| ABE_NNGRRT_21 nt_5-14_011_−_ | saCas9 ABE | saCas9 | NNGRRT | GAGAAT |
| 160664546_saCas9 | | | | |
| CBE_NNGRRT_21 nt_3-12_012_−_ | saCas9 CBE | saCas9 | NNGRRT | GAGAAT |
| 160664546_saCas9 | | | | |
| CBE_NGC_20 nt_4-9_009_−_ | spCas9 NGC CBE | spCas9 | NGC | TGC |
| 160664287_spCas9 | | | | |
| ABE_NGC_20 nt_3-9_008_−_ | spCas9 NGC ABE | spCas9 | NGC | TGC |
| 160664287_spCas9 | | | | |
| CBE_NGA_20 nt_4- | spCas9 VRQR CBE | spCas9 | NGA | AGA |
| 9_006_+_160664312_spCas9 | | | | |
| ABE_NGA_20 nt_3- | spCas9 VRQR ABE | spCas9 | NGA | AGA |
| 9_005_+_160664312_spCas9 | | | | |
| CBE_NGC_20 nt_4- | spCas9 NGC CBE | spCas9 | NGC | TGC |
| 9_009_+_160664398_spCas9 | | | | |
| ABE_NGC_20 nt_3- | spCas9 NGC ABE | spCas9 | NGC | TGC |
| 9_008_+_160664398_spCas9 | | | | |
| ABE_NGG_20 nt_3- | spCas9 ABE | spCas9 | NGG | TGG |
| 9_002_+_160664408_spCas9 | | | | |
| CBE_NGG_20 nt_4- | spCas9 CBE | spCas9 | NGG | TGG |
| 9_003_+_160664408_spCas9 | | | | |
| ABE_NGG_20 nt_3-9_002_−_ | spCas9 ABE | spCas9 | NGG | TGG |
| 160664336_spCas9 | | | | |
| CBE_NGG_20 nt_4-9_003_−_ | spCas9 CBE | spCas9 | NGG | TGG |
| 160664336_spCas9 | | | | |
| CBE_NGC_20 nt_4-9_009_−_ | spCas9 NGC CBE | spCas9 | NGC | TGC |
| 160664352_spCas9 | | | | |
| ABE_NGC_20 nt_3-9_008_−_ | spCas9 NGC ABE | spCas9 | NGC | TGC |
| 160664352_spCas9 | | | | |
| CBE_NGA_20 nt_4-9_006_−_ | spCas9 VRQR CBE | spCas9 | NGA | TGA |
| 160664491_spCas9 | | | | |
| ABE_NGA_20 nt_3-9_005_−_ | spCas9 VRQR ABE | spCas9 | NGA | TGA |
| 160664491_spCas9 | | | | |
| ABE_NGG_20 nt_3-9_002_−_ | spCas9 ABE | spCas9 | NGG | AGG |
| 160664489_spCas9 | | | | |
| CBE_NGG_20 nt_4-9_003_−_ | spCas9 CBE | spCas9 | NGG | AGG |
| 160664489_spCas9 | | | | |
| ABE_NNNRRT_21 nt_5- | saCas9 KKH ABE | saCas9 | NNNRRT | GTCAAT |
| 14_014_+_160664388_saCas9 | | | | |
| CBE_NNNRRT_21 nt_3- | saCas9 KKH CBE | saCas9 | NNNRRT | GTCAAT |
| 12_015_+_160664388_saCas9 | | | | |
| ABE_NGG_20 nt_3-9_002_−_ | spCas9 ABE | spCas9 | NGG | AGG |
| 160664513_spCas9 | | | | |
| CBE_NGG_20 nt_4-9_003_−_ | spCas9 CBE | spCas9 | NGG | AGG |
| 160664513_spCas9 | | | | |
| ABE_NGG_20 nt_3- | spCas9 ABE | spCas9 | NGG | GGG |
| 9_002_+_160664335_spCas9 | | | | |
| CBE_NGG_20 nt_4- | spCas9 CBE | spCas9 | NGG | GGG |
| 9_003_+_160664335_spCas9 | | | | |
| CBE_NGA_20 nt_4- | spCas9 VRQR CBE | spCas9 | NGA | GGA |
| 9_006_+_160664403_spCas9 | | | | |
| ABE_NGA_20 nt_3- | spCas9 VRQR ABE | spCas9 | NGA | GGA |
| 9_005_+_160664403_spCas9 | | | | |
| CBE_NGA_20 nt_4-9_006_−_ | spCas9 VRQR CBE | spCas9 | NGA | TGA |
| 160664449_spCas9 | | | | |
| ABE_NGA_20 nt_3-9_005_−_ | spCas9 VRQR ABE | spCas9 | NGA | TGA |
| 160664449_spCas9 | | | | |
| ABE_NNNRRT_21 nt_5- | saCas9 KKH ABE | saCas9 | NNNRRT | TGCAAT |
| 14_014_+_160664382_saCas9 | | | | |
| CBE_NNNRRT_21 nt_3- | saCas9 KKH CBE | saCas9 | NNNRRT | TGCAAT |
| 12_015_+_160664382_saCas9 | | | | |
| ABE_NGG_20 nt_3-9_002_−_ | spCas9 ABE | spCas9 | NGG | TGG |
| 160664341_spCas9 | | | | |
| CBE_NGG_20 nt_4-9_003_−_ | spCas9 CBE | spCas9 | NGG | TGG |
| 160664341_spCas9 | | | | |
| CBE_NGC_20 nt_4-9_009_−_ | spCas9 NGC CBE | spCas9 | NGC | AGC |
| 160664347_spCas9 | | | | |
| ABE_NGC_20 nt_3-9_008_−_ | spCas9 NGC ABE | spCas9 | NGC | AGC |
| 160664347_spCas9 | | | | |
| CBE_NGC_20 nt_4-9_009_−_ | spCas9 NGC CBE | spCas9 | NGC | GGC |
| 160664340_spCas9 | | | | |
| ABE_NGC_20 nt_3-9_008_−_ | spCas9 NGC ABE | spCas9 | NGC | GGC |
| 160664340_spCas9 | | | | |
| CBE_NGA_20 nt_4-9_006_−_ | spCas9 VRQR CBE | spCas9 | NGA | AGA |
| 160664326_spCas9 | | | | |
| ABE_NGA_20 nt_3-9_005_−_ | spCas9 VRQR ABE | spCas9 | NGA | AGA |
| 160664326_spCas9 | | | | |
| ABE_NNNRRT_21 nt_5-14_014_−_ | saCas9 KKH ABE | saCas9 | NNNRRT | GGTAAT |
| 160664365_saCas9 | | | | |
| CBE_NNNRRT_21 nt_3-12_015_−_ | saCas9 KKH CBE | saCas9 | NNNRRT | GGTAAT |
| 160664365_saCas9 | | | | |
| CBE_NGA_20 nt_4-9_006_−_ | spCas9 VRQR CBE | spCas9 | NGA | TGA |
| 160664328_spCas9 | | | | |
| ABE_NGA_20 nt_3-9_005_−_ | spCas9 VRQR ABE | spCas9 | NGA | TGA |
| 160664328_spCas9 | | | | |
| ABE_NNNRRT_21 nt_5-14_014_−_ | saCas9 KKH ABE | saCas9 | NNNRRT | TCTGGT |
| 160664297_saCas9 | | | | |
| CBE_NNNRRT_21 nt_3-12_015_−_ | saCas9 KKH CBE | saCas9 | NNNRRT | TCTGGT |
| 160664297_saCas9 | | | | |
| CBE_NGA_20 nt_4- | spCas9 VRQR CBE | spCas9 | NGA | TGA |
| 9_006_+_160664495_spCas9 | | | | |
| ABE_NGA_20 nt_3- | spCas9 VRQR ABE | spCas9 | NGA | TGA |
| 9_005_+_160664495_spCas9 | | | | |
| ABE_NNNRRT_21 nt_5- | saCas9 KKH ABE | saCas9 | NNNRRT | GTTAAT |
| 14_014_+_160664294_saCas9 | | | | |
| CBE_NNNRRT_21 nt_3- | saCas9 KKH CBE | saCas9 | NNNRRT | GTTAAT |
| 12_015_+_160664294_saCas9 | | | | |
| CBE_NGA_20 nt_4- | spCas9 VRQR CBE | spCas9 | NGA | AGA |
| 9_006_+_160664395_spCas9 | | | | |
| ABE_NGA_20 nt_3- | spCas9 VRQR ABE | spCas9 | NGA | AGA |
| 9_005_+_160664395_spCas9 | | | | |
| CBE_NGA_20 nt_4-9_006_−_ | spCas9 VRQR CBE | spCas9 | NGA | TGA |
| 160664349_spCas9 | | | | |
| ABE_NGA_20 nt_3-9_005_−_ | spCas9 VRQR ABE | spCas9 | NGA | TGA |
| 160664349_spCas9 | | | | |
| ABE_NGG_20 nt_3- | spCas9 ABE | spCas9 | NGG | TGG |
| 9_002_+_160664401_spCas9 | | | | |
| CBE_NGG_20 nt_4- | spCas9 CBE | spCas9 | NGG | TGG |
| 9_003_+_160664401_spCas9 | | | | |
| CBE_NGA_20 nt_4- | spCas9 VRQR CBE | spCas9 | NGA | TGA |
| 9_006_+_160664352_spCas9 | | | | |
| ABE_NGA_20 nt_3- | spCas9 VRQR ABE | spCas9 | NGA | TGA |
| 9_005_+_160664352_spCas9 | | | | |
| ABE_NNNRRT_21 nt_5- | saCas9 KKH ABE | saCas9 | NNNRRT | AATGAT |
| 14_014_+_160664297_saCas9 | | | | |
| CBE_NNNRRT_21 nt_3- | saCas9 KKH CBE | saCas9 | NNNRRT | AATGAT |
| 12_015_+_160664297_saCas9 | | | | |
| ABE_NNNRRT_21 nt_5-14_014_−_ | saCas9 KKH ABE | saCas9 | NNNRRT | AAAGAT |
| 160664507_saCas9 | | | | |
| CBE_NNNRRT_21 nt_3-12_015_−_ | saCas9 KKH CBE | saCas9 | NNNRRT | AAAGAT |
| 160664507_saCas9 | | | | |
| ABE_NNNRRT_21 nt_5-14_014_−_ | saCas9 KKH ABE | saCas9 | NNNRRT | CTTAAT |
| 160664310_saCas9 | | | | |
| CBE_NNNRRT_21 nt_3-12_015_−_ | saCas9 KKH CBE | saCas9 | NNNRRT | CTTAAT |
| 160664310_saCas9 | | | | |
| ABE_NNNRRT_21 nt_5- | saCas9 KKH ABE | saCas9 | NNNRRT | TTAAGT |
| 14_014_+_160664290_saCas9 | | | | |
| CBE_NNNRRT_21 nt_3- | saCas9 KKH CBE | saCas9 | NNNRRT | TTAAGT |
| 12_015_+_160664290_saCas9 | | | | |
| ABE_NNGRRT_21 nt_5- | saCas9 ABE | saCas9 | NNGRRT | GAGAGT |
| 14_011_+_160664377_saCas9 | | | | |
| CBE_NNGRRT_21 nt_3- | saCas9 CBE | saCas9 | NNGRRT | GAGAGT |
| 12_012_+_160664377_saCas9 | | | | |
| ABE_NNNRRT_21 nt_5- | saCas9 KKH ABE | saCas9 | NNNRRT | ATAGAT |
| 14_014_+_160664392_saCas9 | | | | |
| CBE_NNNRRT_21 nt_3- | saCas9 KKH CBE | saCas9 | NNNRRT | ATAGAT |
| 12_015_+_160664392_saCas9 | | | | |
| ABE_NNNRRT_21 nt_5- | saCas9 KKH ABE | saCas9 | NNNRRT | AGTGGT |
| 14_014_+_160664405_saCas9 | | | | |
| CBE_NNNRRT_21 nt_3- | saCas9 KKH CBE | saCas9 | NNNRRT | AGTGGT |
| 12_015_+_160664405_saCas9 | | | | |
| ABE_NNNRRT_21 nt_5- | saCas9 KKH ABE | saCas9 | NNNRRT | CCTGAT |
| 14_014_+_160664492_saCas9 | | | | |
| CBE_NNNRRT_21 nt_3- | saCas9 KKH CBE | saCas9 | NNNRRT | CCTGAT |
| 12_015_+_160664492_saCas9 | | | | |
| ABE_NNNRRT_21 nt_5- | saCas9 KKH ABE | saCas9 | NNNRRT | ATTAGT |
| 14_014_+_160664496_saCas9 | | | | |
| CBE_NNNRRT_21 nt_3- | saCas9 KKH CBE | saCas9 | NNNRRT | ATTAGT |
| 12_015_+_160664496_saCas9 | | | | |
| ABE_NNNRRT_21 nt_5- | saCas9 KKH ABE | saCas9 | NNNRRT | TAAAAT |
| 14_014_+_160664367_saCas9 | | | | |
| CBE_NNNRRT_21 nt_3- | saCas9 KKH CBE | saCas9 | NNNRRT | TAAAAT |
| 12_015_+_160664367_saCas9 | | | | |
| ABE_NNGRRT_21 nt_5-14_011_−_ | saCas9 ABE | saCas9 | NNGRRT | ATGGGT |
| 160664334_saCas9 | | | | |
| CBE_NNGRRT_21 nt_3-12_012_−_ | saCas9 CBE | saCas9 | NNGRRT | ATGGGT |
| 160664334_saCas9 | | | | |
| ABE_NNNRRT_21 nt_5- | saCas9 KKH ABE | saCas9 | NNNRRT | GGAAGT |
| 14_014_+_160664402_saCas9 | | | | |
| CBE_NNNRRT_21 nt_3- | saCas9 KKH CBE | saCas9 | NNNRRT | GGAAGT |
| 12_015_+_160664402_saCas9 | | | | |
| ABE_NNGRRT_21 nt_5-14_011_−_ | saCas9 ABE | saCas9 | NNGRRT | AGGGGT |
| 160664493_saCas9 | | | | |
| CBE_NNGRRT_21 nt_3-12_012_−_ | saCas9 CBE | saCas9 | NNGRRT | AGGGGT |
| 160664493_saCas9 | | | | |
| ABE_NNGRRT_21 nt_5-14_011_−_ | saCas9 ABE | saCas9 | NNGRRT | GTGGGT |
| 160664289_saCas9 | | | | |
| CBE_NNGRRT_21 nt_3-12_012_−_ | saCas9 CBE | saCas9 | NNGRRT | GTGGGT |
| 160664289_saCas9 | | | | |
| ABE_NNGRRT_21 nt_5- | saCas9 ABE | saCas9 | NNGRRT | TAGAGT |
| 14_011_+_160664357_saCas9 | | | | |
| CBE_NNGRRT_21 nt_3- | saCas9 CBE | saCas9 | NNGRRT | TAGAGT |
| 12_012_+_160664357_saCas9 | | | | |
| ABE_NNGRRT_21 nt_5-14_011_−_ | saCas9 ABE | saCas9 | NNGRRT | GAGAAT |
| 160664322_saCas9 | | | | |
| CBE_NNGRRT_21 nt_3-12_012_−_ | saCas9 CBE | saCas9 | NNGRRT | GAGAAT |
| 160664322_saCas9 | | | | |
| ABE_NNGRRT_21 nt_5- | saCas9 ABE | saCas9 | NNGRRT | CAGGGT |
| 14_011_+_160664332_saCas9 | | | | |
| CBE_NNGRRT_21 nt_3- | saCas9 CBE | saCas9 | NNGRRT | CAGGGT |
| 12_012_+_160664332_saCas9 | | | | |
| ABE_NNGRRT_21 nt_5- | saCas9 ABE | saCas9 | NNGRRT | TTGAAT |
| 14_011_+_160664350_saCas9 | | | | |
| CBE_NNGRRT_21 nt_3- | saCas9 CBE | saCas9 | NNGRRT | TTGAAT |
| 12_012_+_160664350_saCas9 | | | | |
| ABE_NNNRRT_21 nt_5-14_014_−_ | saCas9 KKH ABE | saCas9 | NNNRRT | TCAAAT |
| 160664394_saCas9 | | | | |
| CBE_NNNRRT_21 nt_3-12_015_−_ | saCas9 KKH CBE | saCas9 | NNNRRT | TCAAAT |
| 160664394_saCas9 | | | | |
| | | | Location of target | |
| | | | site on Chr6 | |
| | | SEQ | (hg38.2bit genome | |
| | | ID | sequence) | |
| Guide_Name | Target Sequence | NO | start | end |
| ABE_NNNRRT 21_nt_5- | TATTTTATAAGACTCTATATTCAA | 1782 | 160664368 | 160664395 |
| 14_014_−_160664368_saCas9 | GGT | | | |
| CBE_NNNRRT 21_nt_3- | TATTTTATAAGACTCTATATTCAA | 1783 | 160664368 | 160664395 |
| 12_015_−_160664368_saCas9 | GGT | | | |
| ABE_NGG_20 nt_3-9_002_−_ | AGGCAATGTGGAGCAGCTGAGGG | 1784 | 160664446 | 160664469 |
| 160664446_spCas9 | | | | |
| CBE_NGG_20 nt_4-9_003_−_ | AGGCAATGTGGAGCAGCTGAGGG | 1785 | 160664446 | 160664469 |
| 160664446_spCas9 | | | | |
| CBE_NGC_20 nt_4- | ATGATTCTCTCAGAGACCCATGC | 1786 | 160664319 | 160664342 |
| 9_009_+_160664319_spCas9 | | | | |
| ABE_NGC_20 nt_3- | ATGATTCTCTCAGAGACCCATGC | 1787 | 160664319 | 160664342 |
| 9_008_+_160664319_spCas9 | | | | |
| ABE_NGG_20 nt_3-9_002_−_ | GCAATGTGGAGCAGCTGAGGGGG | 1788 | 160664444 | 160664467 |
| 160664444_spCas9 | | | | |
| CBE_NGG_20 nt_4-9_003_−_ | GCAATGTGGAGCAGCTGAGGGGG | 1789 | 160664444 | 160664467 |
| 160664444_spCas9 | | | | |
| CBE_NGA_20 nt_4-9_006_−_ | GGAGGAAACAAGACTAATCAGGA | 1790 | 160664512 | 160664535 |
| 160664512_spCas9 | | | | |
| ABE_NGA_20 nt_3-9_005_−_ | GGAGGAAACAAGACTAATCAGGA | 1791 | 160664512 | 160664535 |
| 160664512_spCas9 | | | | |
| ABE_NGG_20 nt_3-9_002_−_ | ATCAGGAAAGATGAAGGTCTAGG | 1792 | 160664496 | 160664519 |
| 160664496_spCas9 | | | | |
| CBE_NGG_20 nt_4-9_003_−_ | ATCAGGAAAGATGAAGGTCTAGG | 1793 | 160664496 | 160664519 |
| 160664496_spCas9 | | | | |
| ABE_NGG_20 nt_3-9_002_−_ | AATTTGACTATCTGGTTTGTGGG | 1794 | 160664290 | 160664313 |
| 160664290_spCas9 | | | | |
| CBE_NGG_20 nt_4-9_003_−_ | AATTTGACTATCTGGTTTGTGGG | 1795 | 160664290 | 160664313 |
| 160664290_spCas9 | | | | |
| ABE_NGG_20 nt_3-9_002_−_ | TCAGGAAAGATGAAGGTCTAGGG | 1796 | 160664495 | 160664518 |
| 160664495_spCas9 | | | | |
| CBE_NGG_20 nt_4-9_003_−_ | TCAGGAAAGATGAAGGTCTAGGG | 1797 | 160664495 | 160664518 |
| 160664495_spCas9 | | | | |
| CBE_NGC_20 nt_4- | AAGCCATTTCCCCCCTCAGCTGC | 1798 | 160664434 | 160664457 |
| 9_009_+_160664434_spCas9 | | | | |
| ABE_NGC_20 nt_3- | AAGCCATTTCCCCCCTCAGCTGC | 1799 | 160664434 | 160664457 |
| 9_008_+_160664434_spCas9 | | | | |
| ABE_NNNRRT_21 nt_5- | GAAGGAGTAAGGAGACATAAAGGC | 1800 | 160664462 | 160664489 |
| 14_014_−_160664462_saCas9 | AAT | | | |
| CBE_NNNRRT_21 nt_3- | GAAGGAGTAAGGAGACATAAAGGC | 1801 | 160664462 | 160664489 |
| 12_015_−_160664462_saCas9 | AAT | | | |
| ABE_NGG_20 nt_3-9_002_−_ | CAGGAAAGATGAAGGTCTAGGGG | 1802 | 160664494 | 160664517 |
| 160664494_spCas9 | | | | |
| CBE_NGG_20 nt_4-9_003_−_ | CAGGAAAGATGAAGGTCTAGGGG | 1803 | 160664494 | 160664517 |
| 160664494_spCas9 | | | | |
| ABE_NGG_20 nt_3-9_002_−_ | TAATTTGACTATCTGGTTTGTGG | 1804 | 160664291 | 160664314 |
| 160664291_spCas9 | | | | |
| CBE_NGG_20 nt_4-9_003_−_ | TAATTTGACTATCTGGTTTGTGG | 1805 | 160664291 | 160664314 |
| 160664291_spCas9 | | | | |
| ABE_NNGRRT_21 nt_5- | TTTTATTTTATCCAAAAGAAAGAG | 1806 | 160664546 | 160664573 |
| 14_011_−_160664546_saCas9 | AAT | | | |
| CBE_NNGRRT_21 nt_3- | TTTTATTTTATCCAAAAGAAAGAG | 1807 | 160664546 | 160664573 |
| 12_012_−_160664546_saCas9 | AAT | | | |
| CBE_NGC_20 nt_4-9_009_−_ | TTGACTATCTGGTTTGTGGGTGC | 1808 | 160664287 | 160664310 |
| 160664287_spCas9 | | | | |
| ABE_NGC_20 nt_3-9_008_−_ | TTGACTATCTGGTTTGTGGGTGC | 1809 | 160664287 | 160664310 |
| 160664287_spCas9 | | | | |
| CBE_NGA_20 nt_4- | TAAGTTAATGATTCTCTCAGAGA | 1810 | 160664312 | 160664335 |
| 9_006_+_160664312_spCas9 | | | | |
| ABE_NGA_20 nt_3- | TAAGTTAATGATTCTCTCAGAGA | 1811 | 160664312 | 160664335 |
| 9_005_+_160664312_spCas9 | | | | |
| CBE_NGC_20 nt_4- | GAGAGTGCAATGTCAATAGATGC | 1812 | 160664398 | 160664421 |
| 9_009_+_160664398_spCas9 | | | | |
| ABE_NGC_20 nt_3- | GAGAGTGCAATGTCAATAGATGC | 1813 | 160664398 | 160664421 |
| 9_008_+_160664398_spCas9 | | | | |
| ABE_NGG_20 nt_3- | TGTCAATAGATGCTGGGAAGTGG | 1814 | 160664408 | 160664431 |
| 9_002_+_160664408_spCas9 | | | | |
| CBE_NGG_20 nt_4- | TGTCAATAGATGCTGGGAAGTGG | 1815 | 160664408 | 160664431 |
| 9_003_+_160664408_spCas9 | | | | |
| ABE_NGG_20 nt_3-9_002_−_ | ACCCTGCTGAGCCAGTGGCATGG | 1816 | 160664336 | 160664359 |
| 160664336_spCas9 | | | | |
| CBE_NGG_20 nt_4-9_003_−_ | ACCCTGCTGAGCCAGTGGCATGG | 1817 | 160664336 | 160664359 |
| 160664336_spCas9 | | | | |
| CBE_NGC_20 nt_4-9_009_−_ | TCAAGGTAATGTTTGAACCCTGC | 1818 | 160664352 | 160664375 |
| 160664352_spCas9 | | | | |
| ABE_NGC_20 nt_3-9_008_−_ | TCAAGGTAATGTTTGAACCCTGC | 1819 | 160664352 | 160664375 |
| 160664352_spCas9 | | | | |
| CBE_NGA_20 nt_4-9_006_−_ | GAAAGATGAAGGTCTAGGGGTGA | 1820 | 160664491 | 160664514 |
| 160664491_spCas9 | | | | |
| ABE_NGA_20 nt_3-9_005_−_ | GAAAGATGAAGGTCTAGGGGTGA | 1821 | 160664491 | 160664514 |
| 160664491_spCas9 | | | | |
| ABE_NGG_20 nt_3-9_002_−_ | AAGATGAAGGTCTAGGGGTGAGG | 1822 | 160664489 | 160664512 |
| 160664489_spCas9 | | | | |
| CBE_NGG_20 nt_4-9_003_−_ | AAGATGAAGGTCTAGGGGTGAGG | 1823 | 160664489 | 160664512 |
| 160664489_spCas9 | | | | |
| ABE_NNNRRT_21 nt_5- | TAAAATATTTGAGAGTGCAATGTC | 1824 | 160664388 | 160664415 |
| 14_014_+_160664388_saCas9 | AAT | | | |
| CBE_NNNRRT_21 nt_3- | TAAAATATTTGAGAGTGCAATGTC | 1825 | 160664388 | 160664415 |
| 12_015_+_160664388_saCas9 | AAT | | | |
| ABE_NGG_20 nt_3-9_002_−_ | GGGAGGAAACAAGACTAATCAGG | 1826 | 160664513 | 160664536 |
| 160664513_spCas9 | | | | |
| CBE_NGG_20 nt_4-9_003_−_ | GGGAGGAAACAAGACTAATCAGG | 1827 | 160664513 | 160664536 |
| 160664513_spCas9 | | | | |
| ABE_NGG_20 nt_3- | CCCATGCCACTGGCTCAGCAGGG | 1828 | 160664335 | 160664358 |
| 9_002_+_160664335_spCas9 | | | | |
| CBE_NGG_20 nt_4- | CCCATGCCACTGGCTCAGCAGGG | 1829 | 160664335 | 160664358 |
| 9_003_+_160664335_spCas9 | | | | |
| CBE_NGA_20 nt_4- | TGCAATGTCAATAGATGCTGGGA | 1830 | 160664403 | 160664426 |
| 9_006_+_160664403_spCas9 | | | | |
| ABE_NGA_20 nt_3- | TGCAATGTCAATAGATGCTGGGA | 1831 | 160664403 | 160664426 |
| 9_005_+_160664403_spCas9 | | | | |
| CBE_NGA_20 nt_4-9_006_−_ | TAAAGGCAATGTGGAGCAGCTGA | 1832 | 160664449 | 160664472 |
| 160664449_spCas9 | | | | |
| ABE_NGA_20 nt_3-9_005_−_ | TAAAGGCAATGTGGAGCAGCTGA | 1833 | 160664449 | 160664472 |
| 160664449_spCas9 | | | | |
| ABE_NNNRRT_21 nt_5- | GTCTTATAAAATATTTGAGAGTGC | 1834 | 160664382 | 160664409 |
| 14_014_+_160664382_saCas9 | AAT | | | |
| CBE_NNNRRT_21 nt_3- | GTCTTATAAAATATTTGAGAGTGC | 1835 | 160664382 | 160664409 |
| 12_015_+_160664382_saCas9 | AAT | | | |
| ABE_NGG_20 nt_3-9_002_−_ | TTTGAACCCTGCTGAGCCAGTGG | 1836 | 160664341 | 160664364 |
| 160664341_spCas9 | | | | |
| CBE_NGG_20 nt_4-9_003_−_ | TTTGAACCCTGCTGAGCCAGTGG | 1837 | 160664341 | 160664364 |
| 160664341_spCas9 | | | | |
| CBE_NGC_20 nt_4-9_009_−_ | GTAATGTTTGAACCCTGCTGAGC | 1838 | 160664347 | 160664370 |
| 160664347_spCas9 | | | | |
| ABE_NGC_20 nt_3-9_008_−_ | GTAATGTTTGAACCCTGCTGAGC | 1839 | 160664347 | 160664370 |
| 160664347_spCas9 | | | | |
| CBE_NGC_20 nt_4-9_009_−_ | TTGAACCCTGCTGAGCCAGTGGC | 1840 | 160664340 | 160664363 |
| 160664340_spCas9 | | | | |
| ABE_NGC_20 nt_3-9_008_−_ | TTGAACCCTGCTGAGCCAGTGGC | 1841 | 160664340 | 160664363 |
| 160664340_spCas9 | | | | |
| CBE_NGA_20 nt_4-9_006_−_ | GCCAGTGGCATGGGTCTCTGAGA | 1842 | 160664326 | 160664349 |
| 160664326_spCas9 | | | | |
| ABE_NGA_20 nt_3-9_005_−_ | GCCAGTGGCATGGGTCTCTGAGA | 1843 | 160664326 | 160664349 |
| 160664326_spCas9 | | | | |
| ABE_NNNRRT_21 nt_5- | TTTATAAGACTCTATATTCAAGGT | 1844 | 160664365 | 160664392 |
| 14_014_−_160664365_saCas9 | AAT | | | |
| CBE_NNNRRT_21 nt_3- | TTTATAAGACTCTATATTCAAGGT | 1845 | 160664365 | 160664392 |
| 12_015_−_160664365_saCas9 | AAT | | | |
| CBE_NGA_20 nt_4-9_006_−_ | GAGCCAGTGGCATGGGTCTCTGA | 1846 | 160664328 | 160664351 |
| 160664328_spCas9 | | | | |
| ABE_NGA_20 nt_3-9_005_−_ | GAGCCAGTGGCATGGGTCTCTGA | 1847 | 160664328 | 160664351 |
| 160664328_spCas9 | | | | |
| ABE_NNNRRT_21 nt_5- | ATCATTAACTTAATTTGACTATCT | 1848 | 160664297 | 160664324 |
| 14_014_−_160664297_saCas9 | GGT | | | |
| CBE_NNNRRT_21 nt_3- | ATCATTAACTTAATTTGACTATCT | 1849 | 160664297 | 160664324 |
| 12_015_−_160664297_saCas9 | GGT | | | |
| CBE_NGA_20 nt_4- | CCCTAGACCTTCATCTTTCCTGA | 1850 | 160664495 | 160664518 |
| 9_006_+_160664495_spCas9 | | | | |
| ABE_NGA_20 nt_3- | CCCTAGACCTTCATCTTTCCTGA | 1851 | 160664495 | 160664518 |
| 9_005_+_160664495_spCas9 | | | | |
| ABE_NNNRRT_21 nt_5- | CAAACCAGATAGTCAAATTAAGTT | 1852 | 160664294 | 160664321 |
| 14_014_+_160664294_saCas9 | AAT | | | |
| CBE_NNNRRT_21 nt_3- | CAAACCAGATAGTCAAATTAAGTT | 1853 | 160664294 | 160664321 |
| 12_015_+_160664294_saCas9 | AAT | | | |
| CBE_NGA_20 nt_4- | TTTGAGAGTGCAATGTCAATAGA | 1854 | 160664395 | 160664418 |
| 9_006_+_160664395_spCas9 | | | | |
| ABE_NGA_20 nt_3- | TTTGAGAGTGCAATGTCAATAGA | 1855 | 160664395 | 160664418 |
| 9_005_+_160664395_spCas9 | | | | |
| CBE_NGA_20 nt_4-9_006_−_ | AGGTAATGTTTGAACCCTGCTGA | 1856 | 160664349 | 160664372 |
| 160664349_spCas9 | | | | |
| ABE_NGA_20 nt_3-9_005_−_ | AGGTAATGTTTGAACCCTGCTGA | 1857 | 160664349 | 160664372 |
| 160664349_spCas9 | | | | |
| ABE_NGG_20 nt_3- | AGTGCAATGTCAATAGATGCTGG | 1858 | 160664401 | 160664424 |
| 9_002_+_160664401_spCas9 | | | | |
| CBE_NGG_20 nt_4- | AGTGCAATGTCAATAGATGCTGG | 1859 | 160664401 | 160664424 |
| 9_003_+_160664401_spCas9 | | | | |
| CBE_NGA_20 nt_4- | GCAGGGTTCAAACATTACCTTGA | 1860 | 160664352 | 160664375 |
| 9_006_+_160664352_spCas9 | | | | |
| ABE_NGA_20 nt_3- | GCAGGGTTCAAACATTACCTTGA | 1861 | 160664352 | 160664375 |
| 9_005_+_160664352_spCas9 | | | | |
| ABE_NNNRRT_21 nt_5- | ACCAGATAGTCAAATTAAGTTAAT | 1862 | 160664297 | 160664324 |
| 14_014_+_160664297_saCas9 | GAT | | | |
| CBE_NNNRRT_21 nt_3- | ACCAGATAGTCAAATTAAGTTAAT | 1863 | 160664297 | 160664324 |
| 12_015_+_160664297_saCas9 | GAT | | | |
| ABE_NNNRRT_21 nt_5- | GAGGAAACAAGACTAATCAGGAAA | 1864 | 160664507 | 160664534 |
| 14_014_−_160664507_saCas9 | GAT | | | |
| CBE_NNNRRT_21 nt_3- | GAGGAAACAAGACTAATCAGGAAA | 1865 | 160664507 | 160664534 |
| 12_015_−_160664507_saCas9 | GAT | | | |
| ABE_NNNRRT_21 nt_5- | GGTCTCTGAGAGAATCATTAACTT | 1866 | 160664310 | 160664337 |
| 14_014_−_160664310_saCas9 | AAT | | | |
| CBE_NNNRRT_21 nt_3- | GGTCTCTGAGAGAATCATTAACTT | 1867 | 160664310 | 160664337 |
| 12_015_−_160664310_saCas9 | AAT | | | |
| ABE_NNNRRT_21 nt_5- | CCCACAAACCAGATAGTCAAATTA | 1868 | 160664290 | 160664317 |
| 14_014_+_160664290_saCas9 | AGT | | | |
| CBE_NNNRRT_21 nt_3- | CCCACAAACCAGATAGTCAAATTA | 1869 | 160664290 | 160664317 |
| 12_015_+_160664290_saCas9 | AGT | | | |
| ABE_NNGRRT_21 nt_5- | ATAGAGTCTTATAAAATATTTGAG | 1870 | 160664377 | 160664404 |
| 14_011_+_160664377_saCas9 | AGT | | | |
| CBE_NNGRRT_21 nt_3- | ATAGAGTCTTATAAAATATTTGAG | 1871 | 160664377 | 160664404 |
| 12_012_+_160664377_saCas9 | AGT | | | |
| ABE_NNNRRT_21 nt_5- | ATATTTGAGAGTGCAATGTCAATA | 1872 | 160664392 | 160664419 |
| 14_014_+_160664392_saCas9 | GAT | | | |
| CBE_NNNRRT_21 nt_3- | ATATTTGAGAGTGCAATGTCAATA | 1873 | 160664392 | 160664419 |
| 12_015_+_160664392_saCas9 | GAT | | | |
| ABE_NNNRRT_21 nt_5- | CAATGTCAATAGATGCTGGGAAGT | 1874 | 160664405 | 160664432 |
| 14_014_+_160664405_saCas9 | GGT | | | |
| CBE_NNNRRT_21 nt_3- | CAATGTCAATAGATGCTGGGAAGT | 1875 | 160664405 | 160664432 |
| 12_015_+_160664405_saCas9 | GGT | | | |
| ABE_NNNRRT_21 nt_5- | CACCCCTAGACCTTCATCTTTCCT | 1876 | 160664492 | 160664519 |
| 14_014_+_160664492_saCas9 | GAT | | | |
| CBE_NNNRRT_21 nt_3- | CACCCCTAGACCTTCATCTTTCCT | 1877 | 160664492 | 160664519 |
| 12_015_+_160664492_saCas9 | GAT | | | |
| ABE_NNNRRT_21 nt_5- | CCTAGACCTTCATCTTTCCTGATT | 1878 | 160664496 | 160664523 |
| 14_014_+_160664496_saCas9 | AGT | | | |
| CBE_NNNRRT_21 nt_3- | CCTAGACCTTCATCTTTCCTGATT | 1879 | 160664496 | 160664523 |
| 12_015_+_160664496_saCas9 | AGT | | | |
| ABE_NNNRRT_21 nt_5- | TACCTTGAATATAGAGTCTTATAA | 1880 | 160664367 | 160664394 |
| 14_014_+_160664367_saCas9 | AAT | | | |
| CBE_NNNRRT_21 nt_3- | TACCTTGAATATAGAGTCTTATAA | 1881 | 160664367 | 160664394 |
| 12_015_+_160664367_saCas9 | AAT | | | |
| ABE_NNGRRT_21 nt_5- | GAACCCTGCTGAGCCAGTGGCATG | 1882 | 160664334 | 160664361 |
| 14_011_−_160664334_saCas9 | GGT | | | |
| CBE_NNGRRT_21 nt_3- | GAACCCTGCTGAGCCAGTGGCATG | 1883 | 160664334 | 160664361 |
| 12_012_−_160664334_saCas9 | GGT | | | |
| ABE_NNNRRT_21 nt_5- | GTGCAATGTCAATAGATGCTGGGA | 1884 | 160664402 | 160664429 |
| 14_014_+_160664402_saCas9 | AGT | | | |
| CBE_NNNRRT_21 nt_3- | GTGCAATGTCAATAGATGCTGGGA | 1885 | 160664402 | 160664429 |
| 12_015_+_160664402_saCas9 | AGT | | | |
| ABE_NNGRRT_21 nt_5- | AATCAGGAAAGATGAAGGTCTAGG | 1886 | 160664493 | 160664520 |
| 14_011_−_160664493_saCas9 | GGT | | | |
| CBE_NNGRRT_21 nt_3- | AATCAGGAAAGATGAAGGTCTAGG | 1887 | 160664493 | 160664520 |
| 12_012_−_160664493_saCas9 | GGT | | | |
| ABE_NNGRRT_21 nt_5- | CTTAATTTGACTATCTGGTTTGTG | 1888 | 160664289 | 160664316 |
| 14_011_−_160664289_saCas9 | GGT | | | |
| CBE_NNGRRT_21 nt_3- | CTTAATTTGACTATCTGGTTTGTG | 1889 | 160664289 | 160664316 |
| 12_012_−_160664289_saCas9 | GGT | | | |
| ABE_NNGRRT_21 nt_5- | GTTCAAACATTACCTTGAATATAG | 1890 | 160664357 | 160664384 |
| 14_011_+_160664357_saCas9 | AGT | | | |
| CBE_NNGRRT_21 nt_3- | GTTCAAACATTACCTTGAATATAG | 1891 | 160664357 | 160664384 |
| 12_012_+_160664357_saCas9 | AGT | | | |
| ABE_NNGRRT_21 nt_5- | GCCAGTGGCATGGGTCTCTGAGAG | 1892 | 160664322 | 160664349 |
| 14_011_−_160664322_saCas9 | AAT | | | |
| CBE_NNGRRT_21 nt_3- | GCCAGTGGCATGGGTCTCTGAGAG | 1893 | 160664322 | 160664349 |
| 12_012_−_160664322_saCas9 | AAT | | | |
| ABE_NNGRRT_21 nt_5- | AGACCCATGCCACTGGCTCAGCAG | 1894 | 160664332 | 160664359 |
| 14_011_+_160664332_saCas9 | GGT | | | |
| CBE_NNGRRT_21 nt_3- | AGACCCATGCCACTGGCTCAGCAG | 1895 | 160664332 | 160664359 |
| 12_012_+_160664332_saCas9 | GGT | | | |
| ABE_NNGRRT_21 nt_5- | CAGCAGGGTTCAAACATTACCTTG | 1896 | 160664350 | 160664377 |
| 14_011_+_160664350_saCas9 | AAT | | | |
| CBE_NNGRRT_21 nt_3- | CAGCAGGGTTCAAACATTACCTTG | 1897 | 160664350 | 160664377 |
| 12_012_+_160664350_saCas9 | AAT | | | |
| ABE_NNNRRT_21 nt_5- | GCATCTATTGACATTGCACTCTCA | 1898 | 160664394 | 160664421 |
| 14_014_−_160664394_saCas9 | AAT | | | |
| CBE_NNNRRT_21 nt_3- | GCATCTATTGACATTGCACTCTCA | 1899 | 160664394 | 160664421 |
| 12_015_−_160664394_saCas9 | AAT | | | |

| | | SEQ ID |
|---|---|---|
| Guide_Name | Spacer Sequence | NO |
| ABE_NNNRRT_21 nt_5-14_014_−_ | UAUUUUAUAAGACUCUAUAUU | 1900 |
| 160664368_saCas9 | | |
| CBE_NNNRRT_21 nt_3-12_015_−_ | UAUUUUAUAAGACUCUAUAUU | 1901 |
| 160664368_saCas9 | | |
| ABE_NGG_20 nt_3-9_002_−_160664446_spCas9 | AGGCAAUGUGGAGCAGCUGA | 1902 |
| CBE_NGG_20 nt_4-9_003_−_160664446_spCas9 | AGGCAAUGUGGAGCAGCUGA | 1903 |
| CBE_NGC_20 nt_4-9_009_+_160664319_spCas9 | AUGAUUCUCUCAGAGACCCA | 1904 |
| ABE_NGC_20 nt_3-9_008_+_160664319_spCas9 | AUGAUUCUCUCAGAGACCCA | 1905 |
| ABE_NGG_20 nt_3-9_002_−_160664444_spCas9 | GCAAUGUGGAGCAGCUGAGG | 1906 |
| CBE_NGG_20 nt_4-9_003_−_160664444_spCas9 | GCAAUGUGGAGCAGCUGAGG | 1907 |
| CBE_NGA_20 nt_4-9_006_−_160664512_spCas9 | GGAGGAAACAAGACUAAUCA | 1908 |
| ABE_NGA_20 nt_3-9_005_−_160664512_spCas9 | GGAGGAAACAAGACUAAUCA | 1909 |
| ABE_NGG_20 nt_3-9_002_−_160664496_spCas9 | AUCAGGAAAGAUGAAGGUCU | 1910 |
| CBE_NGG_20 nt_4-9_003_−_160664496_spCas9 | AUCAGGAAAGAUGAAGGUCU | 1911 |
| ABE_NGG_20 nt_3-9_002_−_160664290_spCas9 | AAUUUGACUAUCUGGUUUGU | 1912 |
| CBE_NGG_20 nt_4-9_003_−_160664290_spCas9 | AAUUUGACUAUCUGGUUUGU | 1913 |
| ABE_NGG_20 nt_3-9_002_−_160664495_spCas9 | UCAGGAAAGAUGAAGGUCUA | 1914 |
| CBE_NGG_20 nt_4-9_003_−_160664495_spCas9 | UCAGGAAAGAUGAAGGUCUA | 1915 |
| CBE_NGC_20 nt_4-9_009_+_160664434_spCas9 | AAGCCAUUUCCCCCCUCAGC | 1916 |
| ABE_NGC_20 nt_3-9_008_+_160664434_spCas9 | AAGCCAUUUCCCCCCUCAGC | 1917 |
| ABE_NNNRRT_21 nt_5-14_014_−_ | GAAGGAGUAAGGAGACAUAAA | 1918 |
| 160664462_saCas9 | | |
| CBE_NNNRRT_21 nt_3-12_015_−_ | GAAGGAGUAAGGAGACAUAAA | 1919 |
| 160664462_saCas9 | | |
| ABE_NGG_20 nt_3-9_002_−_160664494_spCas9 | CAGGAAAGAUGAAGGUCUAG | 1920 |
| CBE_NGG_20 nt_4-9_003_−_160664494_spCas9 | CAGGAAAGAUGAAGGUCUAG | 1921 |
| ABE_NGG_20 nt_3-9_002_−_160664291_spCas9 | UAAUUUGACUAUCUGGUUUG | 1922 |
| CBE_NGG_20 nt_4-9_003_−_160664291_spCas9 | UAAUUUGACUAUCUGGUUUG | 1923 |
| ABE_NNGRRT_21 nt_5-14_011_−_ | UUUUAUUUUAUCCAAAAGAAA | 1924 |
| 160664546_saCas9 | | |
| CBE_NNGRRT_21 nt_3-12_012_−_ | UUUUAUUUUAUCCAAAAGAAA | 1925 |
| 160664546_saCas9 | | |
| CBE_NGC_20 nt_4-9_009_−_160664287_spCas9 | UUGACUAUCUGGUUUGUGGG | 1926 |
| ABE_NGC_20 nt_3-9_008_−_160664287_spCas9 | UUGACUAUCUGGUUUGUGGG | 1927 |
| CBE_NGA_20 nt_4-9_006_+_160664312_spCas9 | UAAGUUAAUGAUUCUCUCAG | 1928 |
| ABE_NGA_20 nt_3-9_005_+_160664312_spCas9 | UAAGUUAAUGAUUCUCUCAG | 1929 |
| CBE_NGC_20 nt_4-9_009_+_160664398_spCas9 | GAGAGUGCAAUGUCAAUAGA | 1930 |
| ABE_NGC_20 nt_3-9_008_+_160664398_spCas9 | GAGAGUGCAAUGUCAAUAGA | 1931 |
| ABE_NGG_20 nt_3-9_002_+_160664408_spCas9 | UGUCAAUAGAUGCUGGGAAG | 1932 |
| CBE_NGG_20 nt_4-9_003_+_160664408_spCas9 | UGUCAAUAGAUGCUGGGAAG | 1933 |
| ABE_NGG_20 nt_3-9_002_−_160664336_spCas9 | ACCCUGCUGAGCCAGUGGCA | 1934 |
| CBE_NGG_20 nt_4-9_003_−_160664336_spCas9 | ACCCUGCUGAGCCAGUGGCA | 1935 |
| CBE_NGC_20 nt_4-9_009_−_160664352_spCas9 | UCAAGGUAAUGUUUGAACCC | 1936 |
| ABE_NGC_20 nt_3-9_008_−_160664352_spCas9 | UCAAGGUAAUGUUUGAACCC | 1937 |
| CBE_NGA_20 nt_4-9_006_−_160664491_spCas9 | GAAAGAUGAAGGUCUAGGGG | 1938 |
| ABE_NGA_20 nt_3-9_005_−_160664491_spCas9 | GAAAGAUGAAGGUCUAGGGG | 1939 |
| ABE_NGG_20 nt_3-9_002_−_160664489_spCas9 | AAGAUGAAGGUCUAGGGGUG | 1940 |
| CBE_NGG_20 nt_4-9_003_−_160664489_spCas9 | AAGAUGAAGGUCUAGGGGUG | 1941 |
| ABE_NNNRRT_21 nt_5- | UAAAAUAUUUGAGAGUGCAAU | 1942 |
| 14_014_+_160664388_saCas9 | | |
| CBE_NNNRRT_21 nt_3- | UAAAAUAUUUGAGAGUGCAAU | 1943 |
| 12_015_+_160664388_saCas9 | | |
| ABE_NGG_20 nt_3-9_002_−_160664513_spCas9 | GGGAGGAAACAAGACUAAUC | 1944 |
| CBE_NGG_20 nt_4-9_003_−_160664513_spCas9 | GGGAGGAAACAAGACUAAUC | 1945 |
| ABE_NGG_20 nt_3-9_002_+_160664335_spCas9 | CCCAUGCCACUGGCUCAGCA | 1946 |
| CBE_NGG_20 nt_4-9_003_+_160664335_spCas9 | CCCAUGCCACUGGCUCAGCA | 1947 |
| CBE_NGA_20 nt_4-9_006_+_160664403_spCas9 | UGCAAUGUCAAUAGAUGCUG | 1948 |
| ABE_NGA_20 nt_3-9_005_+_160664403_spCas9 | UGCAAUGUCAAUAGAUGCUG | 1949 |
| CBE_NGA_20 nt_4-9_006_−_160664449_spCas9 | UAAAGGCAAUGUGGAGCAGC | 1950 |
| ABE_NGA_20 nt_3-9_005_−_160664449_spCas9 | UAAAGGCAAUGUGGAGCAGC | 1951 |
| ABE_NNNRRT_21 nt_5- | GUCUUAUAAAAUAUUUGAGAG | 1952 |
| 14_014_+_160664382_saCas9 | | |
| CBE_NNNRRT_21 nt_3- | GUCUUAUAAAAUAUUUGAGAG | 1953 |
| 12_015_+_160664382_saCas9 | | |
| ABE_NGG_20 nt_3-9_002_−_160664341_spCas9 | UUUGAACCCUGCUGAGCCAG | 1954 |
| CBE_NGG_20 nt_4-9_003_−_160664341_spCas9 | UUUGAACCCUGCUGAGCCAG | 1955 |
| CBE_NGC_20 nt_4-9_009_−_160664347_spCas9 | GUAAUGUUUGAACCCUGCUG | 1956 |
| ABE_NGC_20 nt_3-9_008_−_160664347_spCas9 | GUAAUGUUUGAACCCUGCUG | 1957 |
| CBE_NGC_20 nt_4-9_009_−_160664340_spCas9 | UUGAACCCUGCUGAGCCAGU | 1958 |
| ABE_NGC_20 nt_3-9_008_−_160664340_spCas9 | UUGAACCCUGCUGAGCCAGU | 1959 |
| CBE_NGA_20 nt_4-9_006_−_160664326_spCas9 | GCCAGUGGCAUGGGUCUCUG | 1960 |
| ABE_NGA_20 nt_3-9_005_−_160664326_spCas9 | GCCAGUGGCAUGGGUCUCUG | 1961 |
| ABE_NNNRRT_21 nt_5-14_014_−_ | UUUAUAAGACUCUAUAUUCAA | 1962 |
| 160664365_saCas9 | | |
| CBE_NNNRRT_21 nt_3-12_015_−_ | UUUAUAAGACUCUAUAUUCAA | 1963 |
| 160664365_saCas9 | | |
| CBE_NGA_20 nt_4-9_006_−_160664328_spCas9 | GAGCCAGUGGCAUGGGUCUC | 1964 |
| ABE_NGA_20 nt_3-9_005_−_160664328_spCas9 | GAGCCAGUGGCAUGGGUCUC | 1965 |
| ABE_NNNRRT_21 nt_5-14_014_−_ | AUCAUUAACUUAAUUUGACUA | 1966 |
| 160664297_saCas9 | | |
| CBE_NNNRRT_21 nt_3-12_015_−_ | AUCAUUAACUUAAUUUGACUA | 1967 |
| 160664297_saCas9 | | |
| CBE_NGA_20 nt_4-9_006_+_160664495_spCas9 | CCCUAGACCUUCAUCUUUCC | 1968 |
| ABE_NGA_20 nt_3-9_005_+_160664495_spCas9 | CCCUAGACCUUCAUCUUUCC | 1969 |
| ABE_NNNRRT_21 nt_5- | CAAACCAGAUAGUCAAAUUAA | 1970 |
| 14_014_+_160664294_saCas9 | | |
| CBE_NNNRRT_21 nt_3- | CAAACCAGAUAGUCAAAUUAA | 1971 |
| 12_015_+_160664294_saCas9 | | |
| CBE_NGA_20 nt_4-9_006_+_160664395_spCas9 | UUUGAGAGUGCAAUGUCAAU | 1972 |
| ABE_NGA_20 nt_3-9_005_+_160664395_spCas9 | UUUGAGAGUGCAAUGUCAAU | 1973 |
| CBE_NGA_20 nt_4-9_006_−_160664349_spCas9 | AGGUAAUGUUUGAACCCUGC | 1974 |
| ABE_NGA_20 nt_3-9_005_−_160664349_spCas9 | AGGUAAUGUUUGAACCCUGC | 1975 |
| ABE_NGG_20 nt_3-9_002_+_160664401_spCas9 | AGUGCAAUGUCAAUAGAUGC | 1976 |
| CBE_NGG_20 nt_4-9_003_+_160664401_spCas9 | AGUGCAAUGUCAAUAGAUGC | 1977 |
| CBE_NGA_20 nt_4-9_006_+_160664352_spCas9 | GCAGGGUUCAAACAUUACCU | 1978 |
| ABE_NGA_20 nt_3-9_005_+_160664352_spCas9 | GCAGGGUUCAAACAUUACCU | 1979 |
| ABE_NNNRRT_21 nt_5- | ACCAGAUAGUCAAAUUAAGUU | 1980 |
| 14_014_+_160664297_saCas9 | | |
| CBE_NNNRRT_21 nt_3- | ACCAGAUAGUCAAAUUAAGUU | 1981 |
| 12_015_+_160664297_saCas9 | | |
| ABE_NNNRRT_21 nt_5-14_014_−_ | GAGGAAACAAGACUAAUCAGG | 1982 |
| 160664507_saCas9 | | |
| CBE_NNNRRT_21 nt_3-12_015_−_ | GAGGAAACAAGACUAAUCAGG | 1983 |
| 160664507_saCas9 | | |
| ABE_NNNRRT_21 nt_5-14_014_−_ | GGUCUCUGAGAGAAUCAUUAA | 1984 |
| 160664310_saCas9 | | |
| CBE_NNNRRT_21 nt_3-12_015_−_ | GGUCUCUGAGAGAAUCAUUAA | 1985 |
| 160664310_saCas9 | | |
| ABE_NNNRRT_21 nt_5- | CCCACAAACCAGAUAGUCAAA | 1986 |
| 14_014_+_160664290_saCas9 | | |
| CBE_NNNRRT_21 nt_3- | CCCACAAACCAGAUAGUCAAA | 1987 |
| 12_015_+_160664290_saCas9 | | |
| ABE_NNGRRT_21 nt_5- | AUAGAGUCUUAUAAAAUAUUU | 1988 |
| 14_011_+_160664377_saCas9 | | |
| CBE_NNGRRT_21 nt_3- | AUAGAGUCUUAUAAAAUAUUU | 1989 |
| 12_012_+_160664377_saCas9 | | |
| ABE_NNNRRT_21 nt_5- | AUAUUUGAGAGUGCAAUGUCA | 1990 |
| 14_014_+_160664392_saCas9 | | |
| CBE_NNNRRT_21 nt_3- | AUAUUUGAGAGUGCAAUGUCA | 1991 |
| 12_015_+_160664392_saCas9 | | |
| ABE_NNNRRT_21 nt_5- | CAAUGUCAAUAGAUGCUGGGA | 1992 |
| 14_014_+_160664405_saCas9 | | |
| CBE_NNNRRT_21 nt_3- | CAAUGUCAAUAGAUGCUGGGA | 1993 |
| 12_015_+_160664405_saCas9 | | |
| ABE_NNNRRT_21 nt_5- | CACCCCUAGACCUUCAUCUUU | 1994 |
| 14_014_+_160664492_saCas9 | | |
| CBE_NNNRRT_21 nt_3- | CACCCCUAGACCUUCAUCUUU | 1995 |
| 12_015_+_160664492_saCas9 | | |
| ABE_NNNRRT_21 nt_5- | CCUAGACCUUCAUCUUUCCUG | 1996 |
| 14_014_+_160664496_saCas9 | | |
| CBE_NNNRRT_21 nt_3- | CCUAGACCUUCAUCUUUCCUG | 1997 |
| 12_015_+_160664496_saCas9 | | |
| ABE_NNNRRT_21 nt_5- | UACCUUGAAUAUAGAGUCUUA | 1998 |
| 14_014_+_160664367_saCas9 | | |
| CBE_NNNRRT_21 nt_3- | UACCUUGAAUAUAGAGUCUUA | 1999 |
| 12_015_+_160664367_saCas9 | | |
| ABE_NNGRRT_21 nt_5-14_011_−_ | GAACCCUGCUGAGCCAGUGGC | 2000 |
| 160664334_saCas9 | | |
| CBE_NNGRRT_21 nt_3-12_012_−_ | GAACCCUGCUGAGCCAGUGGC | 2001 |
| 160664334_saCas9 | | |
| ABE_NNNRRT_21 nt_5- | GUGCAAUGUCAAUAGAUGCUG | 2002 |
| 14_014_+_160664402_saCas9 | | |
| CBE_NNNRRT_21 nt_3- | GUGCAAUGUCAAUAGAUGCUG | 2003 |
| 12_015_+_160664402_saCas9 | | |
| ABE_NNGRRT_21 nt_5-14_011_−_ | AAUCAGGAAAGAUGAAGGUCU | 2004 |
| 160664493_saCas9 | | |
| CBE_NNGRRT_21 nt_3-12_012_−_ | AAUCAGGAAAGAUGAAGGUCU | 2005 |
| 160664493_saCas9 | | |
| ABE_NNGRRT_21 nt_5-14_011_−_ | CUUAAUUUGACUAUCUGGUUU | 2006 |
| 160664289_saCas9 | | |
| CBE_NNGRRT_21 nt_3-12_012_−_ | CUUAAUUUGACUAUCUGGUUU | 2007 |
| 160664289_saCas9 | | |
| ABE_NNGRRT_21 nt_5- | GUUCAAACAUUACCUUGAAUA | 2008 |
| 14_011_+_160664357_saCas9 | | |
| CBE_NNGRRT_21 nt_3- | GUUCAAACAUUACCUUGAAUA | 2009 |
| 12_012_+_160664357_saCas9 | | |
| ABE_NNGRRT_21 nt_5-14_011_−_ | GCCAGUGGCAUGGGUCUCUGA | 2010 |
| 160664322_saCas9 | | |
| CBE_NNGRRT_21 nt_3-12_012_−_ | GCCAGUGGCAUGGGUCUCUGA | 2011 |
| 160664322_saCas9 | | |
| ABE_NNGRRT_21 nt_5- | AGACCCAUGCCACUGGCUCAG | 2012 |
| 14_011_+_160664332_saCas9 | | |
| CBE_NNGRRT_21 nt_3- | AGACCCAUGCCACUGGCUCAG | 2013 |
| 12_012_+_160664332_saCas9 | | |
| ABE_NNGRRT_21 nt_5- | CAGCAGGGUUCAAACAUUACC | 2014 |
| 14_011_+_160664350_saCas9 | | |
| CBE_NNGRRT_21 nt_3- | CAGCAGGGUUCAAACAUUACC | 2015 |
| 12_012_+_160664350_saCas9 | | |
| ABE_NNNRRT_21 nt_5-14_014_−_ | GCAUCUAUUGACAUUGCACUC | 2016 |
| 160664394_saCas9 | | |
| CBE_NNNRRT_21 nt_3-12_015_−_ | GCAUCUAUUGACAUUGCACUC | 2017 |
| 160664394_saCas9 | | |

TABLE 2
Exemplary base editor amino acid sequences.

| | | Base | | | Editing |
|---|---|---|---|---|---|
| Plasmid Name | mRNA entity | Editor | Deaminase | PAM | window |
| pHRB-424 | 2928, 4071 | ABE | TadA*8.20 | NGA | 3-9 |

MSEVEFSHEYWMRHALTLAKRARDEREVPVGAVLVLNNRVIGEGWNRAIGLHDPTAHAEIMAL
RQGGLVMQNYRLYDATLYSTFEPCVMCAGAMIHSRIGRVVFGVRNAKTGAAGSLMDVLHHPGM
NHRVEITEGILADECAALLCRFFRMPRRVFNAQKKAQSSTDSGGSSGGSSGSETPGTSESATP
ESSGGSSGGSDKKYSIGLAIGTNSVGWAVITDEYKVPSKKFKVLGNTDRHSIKKNLIGALLFD
SGETAEATRLKRTARRRYTRRKNRICYLQEIFSNEMAKVDDSFFHRLEESFLVEEDKKHERHP
IFGNIVDEVAYHEKYPTIYHLRKKLVDSTDKADLRLIYLALAHMIKFRGHFLIEGDLNPDNSD
VDKLFIQLVQTYNQLFEENPINASGVDAKAILSARLSKSRRLENLIAQLPGEKKNGLFGNLIA
LSLGLTPNFKSNFDLAEDAKLQLSKDTYDDDLDNLLAQIGDQYADLFLAAKNLSDAILLSDIL
RVNTEITKAPLSASMIKRYDEHHQDLTLLKALVRQQLPEKYKEIFFDQSKNGYAGYIDGGASQ
EEFYKFIKPILEKMDGTEELLVKLNREDLLRKQRTFDNGSIPHQIHLGELHAILRRQEDFYPF
LKDNREKIEKILTFRIPYYVGPLARGNSRFAWMTRKSEETITPWNFEEVVDKGASAQSFIERM
TNFDKNLPNEKVLPKHSLLYEYFTVYNELTKVKYVTEGMRKPAFLSGEQKKAIVDLLFKTNRK
VTVKQLKEDYFKKIECFDSVEISGVEDRFNASLGTYHDLLKIIKDKDFLDNEENEDILEDIVL
TLTLFEDREMIEERLKTYAHLFDDKVMKQLKRRRYTGWGRLSRKLINGIRDKQSGKTILDFLK
SDGFANRNFMQLIHDDSLTFKEDIQKAQVSGQGDSLHEHIANLAGSPAIKKGILQTVKVVDEL
VKVMGRHKPENIVIEMARENQTTQKGQKNSRERMKRIEEGIKELGSQILKEHPVENTQLQNEK
LYLYYLQNGRDMYVDQELDINRLSDYDVDHIVPQSFLKDDSIDNKVLTRSDKNRGKSDNVPSE
EVVKKMKNYWRQLLNAKLITQRKFDNLTKAERGGLSELDKAGFIKRQLVETRQITKHVAQILD
SRMNTKYDENDKLIREVKVITLKSKLVSDFRKDFQFYKVREINNYHHAHDAYLNAVVGTALIK
KYPKLESEFVYGDYKVYDVRKMIAKSEQEIGKATAKYFFYSNIMNFFKTEITLANGEIRKRPL
IETNGETGEIVWDKGRDFATVRKVLSMPQVNIVKKTEVQTGGFSKESILPKRNSDKLIARKKD
WDPKKYGGFVSPTVAYSVLVVAKVEKGKSKKLKSVKELLGITIMERSSFEKNPIDFLEAKGYK
EVKKDLIIKLPKYSLFELENGRKRMLASARELQKGNELALPSKYVNFLYLASHYEKLKGSPED
NEQKQLFVEQHKHYLDEIIEQISEFSKRVILADANLDKVLSAYNKHRDKPIREQAENIIHLFT
LTNLGAPAAFKYFDTTIDRKQYRSTKEVLDATLIHQSITGLYETRIDLSQLGGDEGADKRTAD
GSEFESPKKKRKV (SEQ ID NO: 430)

| | | Base | | | Editing |
|---|---|---|---|---|---|
| Plasmid Name | mRNA entity | Editor | Deaminase | PAM | window |
| PCR-001 | 3165 | ABE | TadA*8.20 | NGA | 3-12 |

MKRTADGSEFESPKKKRKVDKKYSIGLAIGTNSVGWAVITDEYKVPSKKFKVLGNTDRHSIKK
NLIGALLFDSGETAEATRLKRTARRRYTRRKNRICYLQEIFSNEMAKVDDSFFHRLEESFLVE
EDKKHERHPIFGNIVDEVAYHEKYPTIYHLRKKLVDSTDKADLRLIYLALAHMIKFRGHFLIE
GDLNPDNSDVDKLFIQLVQTYNQLFEENPINASGVDAKAILSARLSKSRRLENLIAQLPGEKK
NGLFGNLIALSLGLTPNFKSNFDLAEDAKLQLSKDTYDDDLDNLLAQIGDQYADLFLAAKNLS
DAILLSDILRVNTEITKAPLSASMIKRYDEHHQDLTLLKALVRQQLPEKYKEIFFDQSKNGYA
GYIDGGASQEEFYKFIKPILEKMDGTEELLVKLNREDLLRKQRTFDNGSIPHQIHLGELHAIL
RRQEDFYPFLKDNREKIEKILTFRIPYYVGPLARGNSRFAWMTRKSEETITPWNFEEVVDKGA
SAQSFIERMTNFDKNLPNEKVLPKHSLLYEYFTVYNELTKVKYVTEGMRKPAFLSGEQKKAIV
DLLFKTNRKVTVKQLKEDYFKKIECFDSVEISGVEDRFNASLGTYHDLLKIIKDKDFLDNEEN
EDILEDIVLTLTLFEDREMIEERLKTYAHLFDDKVMKQLKRRRYTGWGRLSRKLINGIRDKQS
GKTILDFLKSDGFANRNFMQLIHDDSLTFKEDIQKAQVSGQGDSLHEHIANLAGSPAIKKGIL
QTVKVVDELVKVMGRHKPENIVIEMARENQTTQKGQKNSRERMKRIEEGIKELGSQILKEHPV
ENTQLQNEKLYLYYLQNGRDMYVDQELDINRLSDYDVDHIVPQSFLKDDSIDNKVLTRSDKNR
GKSDNVPSEEVVKKMKNYWRQLLNAKLITQRKFDNLTKAERGGLSELDKAGFIKRQLVETRQI
TKHVAQILDSRMNTKYDENDKLIREVKVITLKSKLVSDFRKDFQFYKVREINNYHHAHDAYLN
AVVGTALIKKYPKLESEFVYGDYKVYDVRKMIAKSEQEIGKATAKYFFYSNIMNFFKTEITLA
NGEIRKRPLIETNGETGEIVWDKGRDFATVRKVLSMPQVNIVKKTEVQTGGFSKESILPKRNS
DKLIARKKDWDPKKYGGFVSPTVAYSVLVVAKVEKGKSKKLKSVKELLGITIMERSSFEKNPI
DFLEAKGYKEVKKDLIIKLPKYSLFELENGRKRMLASARELQKGNELALPSKYVNFLYLASHY
EKLKGGSSGSETPGTSESATPESSGSEVEFSHEYWMRHALTLAKRARDEREVPVGAVLVLNNR
VIGEGWNRAIGLHDPTAHAEIMALRQGGLVMQNYRLYDATLYSTFEPCVMCAGAMIHSRIGRV
VFGVRNAKTGAAGSLMDVLHHPGMNHRVEITEGILADECAALLCRFFRMPRRVFNAQKKAQSS
TDSPEDNEQKQLFVEQHKHYLDEIIEQISEFSKRVILADANLDKVLSAYNKHRDKPIREQAEN
IIHLFTLTNLGAPAAFKYFDTTIDRKQYRSTKEVLDATLIHQSITGLYETRIDLSQLGGDEGA
DKRTADGSEFESPKKKRKV (SEQ ID NO: 429)

| | | Base | | | Editing |
|---|---|---|---|---|---|
| Plasmid Name | mRNA entity | Editor | Deaminase | PAM | window |
| PST-109 | 2626 | ABE | TadA*8.20 | NG | 3-9 |

MKRTADGSEFESPKKKRKVSEVEFSHEYWMRHALTLAKRARDEREVPVGAVLVLNNRVIGEGW
NRAIGLHDPTAHAEIMALRQGGLVMQNYRLYDATLYSTFEPCVMCAGAMIHSRIGRVVFGVRN
AKTGAAGSLMDVLHHPGMNHRVEITEGILADECAALLCRFFRMPRRVFNAQKKAQSSTDSGGS
SGGSSGSETPGTSESATPESSGGSSGGSDKKYSIGLAIGTNSVGWAVITDEYKVPSKKFKVLG
NTDRHSIKKNLIGALLFDSGETAEATRLKRTARRRYTRRKNRICYLQEIFSNEMAKVDDSFFH
RLEESFLVEEDKKHERHPIFGNIVDEVAYHEKYPTIYHLRKKLVDSTDKADLRLIYLALAHMI
KFRGHFLIEGDLNPDNSDVDKLFIQLVQTYNQLFEENPINASGVDAKAILSARLSKSRRLENL
IAQLPGEKKNGLFGNLIALSLGLTPNFKSNFDLAEDAKLQLSKDTYDDDLDNLLAQIGDQYAD
LFLAAKNLSDAILLSDILRVNTEITKAPLSASMIKRYDEHHQDLTLLKALVRQQLPEKYKEIF
FDQSKNGYAGYIDGGASQEEFYKFIKPILEKMDGTEELLVKLNREDLLRKQRTFDNGSIPHQI
HLGELHAILRRQEDFYPFLKDNREKIEKILTFRIPYYVGPLARGNSRFAWMTRKSEETITPWN
FEEVVDKGASAQSFIERMTNFDKNLPNEKVLPKHSLLYEYFTVYNELTKVKYVTEGMRKPAFL
SGEQKKAIVDLLFKTNRKVTVKQLKEDYFKKIECFDSVEISGVEDRFNASLGTYHDLLKIIKD
KDFLDNEENEDILEDIVLTLTLFEDREMIEERLKTYAHLFDDKVMKQLKRRRYTGWGRLSRKL
INGIRDKQSGKTILDFLKSDGFANRNFMQLIHDDSLTFKEDIQKAQVSGQGDSLHEHIANLAG
SPAIKKGILQTVKVVDELVKVMGRHKPENIVIEMARENQTTQKGQKNSRERMKRIEEGIKELG
SQILKEHPVENTQLQNEKLYLYYLQNGRDMYVDQELDINRLSDYDVDHIVPQSFLKDDSIDNK
VLTRSDKNRGKSDNVPSEEVVKKMKNYWRQLLNAKLITQRKFDNLTKAERGGLSELDKAGFIK
RQLVETRQITKHVAQILDSRMNTKYDENDKLIREVKVITLKSKLVSDFRKDFQFYKVREINNY
HHAHDAYLNAVVGTALIKKYPKLESEFVYGDYKVYDVRKMIAKSEQEIGKATAKYFFYSNIMN
FFKTEITLANGEIRKRPLIETNGETGEIVWDKGRDFATVRKVLSMPQVNIVKKTEVQTGGFSK
ESIRPKRNSDKLIARKKDWDPKKYGGFVSPTVAYSVLVVAKVEKGKSKKLKSVKELLGITIME
RSSFEKNPIDFLEAKGYKEVKKDLIIKLPKYSLFELENGRKRMLASARFLQKGNELALPSKYV
NFLYLASHYEKLKGSPEDNEQKQLFVEQHKHYLDEIIEQISEFSKRVILADANLDKVLSAYNK
HRDKPIREQAENIIHLFTLTNLGAPRAFKYFDTTIDRKAYRSTKEVLDATLIHQSITGLYETR
IDLSQLGGDEGADKRTADGSEFESPKKKRKV (SEQ ID NO: 428)

| | | Base | | | Editing |
|---|---|---|---|---|---|
| Plasmid Name | mRNA entity | Editor | Deaminase | PAM | window |
| PCR-004 | 3167 | ABE | TadA*8.20 | NGC | 3-12 |

MKRTADGSEFESPKKKRKVDKKYSIGLAIGTNSVGWAVITDEYKVPSKKFKVLGNTDRHSIKK
NLIGALLFDSGETAEATRLKRTARRRYTRRKNRICYLQEIFSNEMAKVDDSFFHRLEESFLVE
EDKKHERHPIFGNIVDEVAYHEKYPTIYHLRKKLVDSTDKADLRLIYLALAHMIKFRGHFLIE
GDLNPDNSDVDKLFIQLVQTYNQLFEENPINASGVDAKAILSARLSKSRRLENLIAQLPGEKK
NGLFGNLIALSLGLTPNFKSNFDLAEDAKLQLSKDTYDDDLDNLLAQIGDQYADLFLAAKNLS
DAILLSDILRVNTEITKAPLSASMVKRYDEHHQDLTLLKALVRQQLPEKYKEIFFDQSKNGYA
GYIDGGASQEEFYKFIKPILEKMDGTEELLVKLNREDLLRKQRTFDNGIIPHQIHLGELHAIL
RRQGDFYPFLKDNREKIEKILTFRIPYYVGPLARGNSRFAWMTRKSEETITPWNFEEVVDKGA
SAQSFIERMTNFDKNLPNEKVLPKHSLLYEYFTVYNELTKVKYVTEGMRKPAFLSGEQKKAIV
DLLFKTNRKVTVKQLKEDYFKKIECFDSVEISGVEDRFNASLGTYHDLLKIIKDKDFLDNEEN
EDILEDIVLTLTLFEDREMIEERLKTYAHLFDDKVMKQLKRLRYTGWGRLSRKLINGIRDKQS
GKTILDFLKSDGFANRNFMQLIHDDSLTFKEDIQKAQVSGQGDSLHEHIANLAGSPAIKKGIL
QTVKVVDELVKVMGGHKPENIVIEMARENQTTQKGQKNSRERMKRIEEGIKELGSQILKEHPV
ENTQLQNEKLYLYYLQNGRDMYVDQELDINRLSDYDVDHIVPQSFLKDDSIDNKVLTRSDKNR
GKSDNVPSEEVVKKMKNYWRQLLNAKLITQRKFDNLTKAERGGLSELDKAGFIKRQLVETRQI
TKHVAQILDSRMNTKYDENDKLIREVKVITLKSKLVSDFRKDFQFYKVREINNYHHAHDAYLN
AVVGTALIKKYPKLESEFVYGDYKVYDVRKMIAKSEQEIGKATAKYFFYSNIMNFFKTEITLA
NGEIRKRPLIETNGETGEIVWDKGRDFATVRKVLSMPQVNIVKKTEVQTGGFSKESILPKGNS
DKLIARKKDWDPKKYGGFMQPTVAYSVLVVAKVEKGKSKKLKSVKELLGITIMERSSFEKNPI
DFLEAKGYKEVKKDLIIKLPKYSLFELENGRKRMLASAKFLQKGNELALPSKYVNFLYLASHY
EKLKGGSSGSETPGTSESATPESSGSEVEFSHEYWMRHALTLAKRARDEREVPVGAVLVLNNR
VIGEGWNRAIGLHDPTAHAEIMALRQGGLVMQNYRLYDATLYSTFEPCVMCAGAMIHSRIGRV
VFGVRNAKTGAAGSLMDVLHHPGMNHRVEITEGILADECAALLCRFFRMPRRVFNAQKKAQSS
TDSPEDNEQKQLFVEQHKHYLDEIIEQISEFSKRVILADANLDKVLSAYNKHRDKPIREQAEN
IIHLFTLTNLGAPRAFKYFDTTIARKEYRSTKEVLDATLIHQSITGLYETRIDLSQLGGDEGA
DKRTADGSEFESPKKKRKV (SEQ ID NO: 431)

| | | Base | | | Editing |
|---|---|---|---|---|---|
| Plasmid Name | mRNA entity | Editor | Deaminase | PAM | window |
| PST-107 | 2743, 3626 | ABE | TadA*8.20 | NGC | 3-9 |

MKRTADGSEFESPKKKRKVSEVEFSHEYWMRHALTLAKRARDEREVPVGAVLVLNNRVIGEGW
NRAIGLHDPTAHAEIMALRQGGLVMQNYRLYDATLYSTFEPCVMCAGAMIHSRIGRVVFGVRN
AKTGAAGSLMDVLHHPGMNHRVEITEGILADECAALLCRFFRMPRRVFNAQKKAQSSTDSGGS
SGGSSGSETPGTSESATPESSGGSSGGSDKKYSIGLAIGTNSVGWAVITDEYKVPSKKFKVLG
NTDRHSIKKNLIGALLFDSGETAEATRLKRTARRRYTRRKNRICYLQEIFSNEMAKVDDSFFH
RLEESFLVEEDKKHERHPIFGNIVDEVAYHEKYPTIYHLRKKLVDSTDKADLRLIYLALAHMI
KFRGHFLIEGDLNPDNSDVDKLFIQLVQTYNQLFEENPINASGVDAKAILSARLSKSRRLENL
IAQLPGEKKNGLFGNLIALSLGLTPNFKSNFDLAEDAKLQLSKDTYDDDLDNLLAQIGDQYAD
LFLAAKNLSDAILLSDILRVNTEITKAPLSASMVKRYDEHHQDLTLLKALVRQQLPEKYKEIF
FDQSKNGYAGYIDGGASQEEFYKFIKPILEKMDGTEELLVKLNREDLLRKQRTFDNGIIPHQI
HLGELHAILRRQGDFYPFLKDNREKIEKILTFRIPYYVGPLARGNSRFAWMTRKSEETITPWN
FEEVVDKGASAQSFIERMTNFDKNLPNEKVLPKHSLLYEYFTVYNELTKVKYVTEGMRKPAFL
SGEQKKAIVDLLFKTNRKVTVKQLKEDYFKKIECFDSVEISGVEDRFNASLGTYHDLLKIIKD
KDFLDNEENEDILEDIVLTLTLFEDREMIEERLKTYAHLFDDKVMKQLKRLRYTGWGRLSRKL
INGIRDKQSGKTILDFLKSDGFANRNFMQLIHDDSLTFKEDIQKAQVSGQGDSLHEHIANLAG
SPAIKKGILQTVKVVDELVKVMGGHKPENIVIEMARENQTTQKGQKNSRERMKRIEEGIKELG
SQILKEHPVENTQLQNEKLYLYYLQNGRDMYVDQELDINRLSDYDVDHIVPQSFLKDDSIDNK
VLTRSDKNRGKSDNVPSEEVVKKMKNYWRQLLNAKLITQRKFDNLTKAERGGLSELDKAGFIK
RQLVETRQITKHVAQILDSRMNTKYDENDKLIREVKVITLKSKLVSDFRKDFQFYKVREINNY
HHAHDAYLNAVVGTALIKKYPKLESEFVYGDYKVYDVRKMIAKSEQEIGKATAKYFFYSNIMN
FFKTEITLANGEIRKRPLIETNGETGEIVWDKGRDFATVRKVLSMPQVNIVKKTEVQTGGFSK
ESILPKGNSDKLIARKKDWDPKKYGGFMQPTVAYSVLVVAKVEKGKSKKLKSVKELLGITIME
RSSFEKNPIDFLEAKGYKEVKKDLIIKLPKYSLFELENGRKRMLASAKFLQKGNELALPSKYV
NFLYLASHYEKLKGSPEDNEQKQLFVEQHKHYLDEIIEQISEFSKRVILADANLDKVLSAYNK
HRDKPIREQAENIIHLFTLTNLGAPRAFKYFDTTIARKEYRSTKEVLDATLIHQSITGLYETR
IDLSQLGGDEGADKRTADGSEFESPKKKRKV (SEQ ID NO: 432)

| | | Base | | | Editing |
|---|---|---|---|---|---|
| Plasmid Name | mRNA entity | Editor | Deaminase | PAM | window |
| PCR-007-002 | 3169 | ABE | TadA*8.20 | NGG | 3-12 |

MKRTADGSEFESPKKKRKVDKKYSIGLAIGTNSVGWAVITDEYKVPSKKFKVLGNTDRHSIKK
NLIGALLFDSGETAEATRLKRTARRRYTRRKNRICYLQEIFSNEMAKVDDSFFHRLEESFLVE
EDKKHERHPIFGNIVDEVAYHEKYPTIYHLRKKLVDSTDKADLRLIYLALAHMIKFRGHFLIE
GDLNPDNSDVDKLFIQLVQTYNQLFEENPINASGVDAKAILSARLSKSRRLENLIAQLPGEKK
NGLFGNLIALSLGLTPNFKSNFDLAEDAKLQLSKDTYDDDLDNLLAQIGDQYADLFLAAKNLS
DAILLSDILRVNTEITKAPLSASMIKRYDEHHQDLTLLKALVRQQLPEKYKEIFFDQSKNGYA
GYIDGGASQEEFYKFIKPILEKMDGTEELLVKLNREDLLRKQRTFDNGSIPHQIHLGELHAIL
RRQEDFYPFLKDNREKIEKILTFRIPYYVGPLARGNSRFAWMTRKSEETITPWNFEEVVDKGA
SAQSFIERMTNFDKNLPNEKVLPKHSLLYEYFTVYNELTKVKYVTEGMRKPAFLSGEQKKAIV
DLLFKTNRKVTVKQLKEDYFKKIECFDSVEISGVEDRFNASLGTYHDLLKIIKDKDFLDNEEN
EDILEDIVLTLTLFEDREMIEERLKTYAHLFDDKVMKQLKRRRYTGWGRLSRKLINGIRDKQS
GKTILDFLKSDGFANRNFMQLIHDDSLTFKEDIQKAQVSGQGDSLHEHIANLAGSPAIKKGIL
QTVKVVDELVKVMGRHKPENIVIEMARENQTTQKGQKNSRERMKRIEEGIKELGSQILKEHPV
ENTQLQNEKLYLYYLQNGRDMYVDQELDINRLSDYDVDHIVPQSFLKDDSIDNKVLTRSDKNR
GKSDNVPSEEVVKKMKNYWRQLLNAKLITQRKFDNLTKAERGGLSELDKAGFIKRQLVETRQI
TKHVAQILDSRMNTKYDENDKLIREVKVITLKSKLVSDFRKDFQFYKVREINNYHHAHDAYLN
AVVGTALIKKYPKLESEFVYGDYKVYDVRKMIAKSEQEIGKATAKYFFYSNIMNFFKTEITLA
NGEIRKRPLIETNGETGEIVWDKGRDFATVRKVLSMPQVNIVKKTEVQTGGFSKESILPKRNS
DKLIARKKDWDPKKYGGFDSPTVAYSVLVVAKVEKGKSKKLKSVKELLGITIMERSSFEKNPI
DFLEAKGYKEVKKDLIIKLPKYSLFELENGRKRMLASAGELQKGNELALPSKYVNFLYLASHY
EKLKGGSSGSETPGTSESATPESSGSEVEFSHEYWMRHALTLAKRARDEREVPVGAVLVLNNR
VIGEGWNRAIGLHDPTAHAEIMALRQGGLVMQNYRLYDATLYSTFEPCVMCAGAMIHSRIGRV
VFGVRNAKTGAAGSLMDVLHHPGMNHRVEITEGILADECAALLCRFFRMPRRVFNAQKKAQSS
TDSPEDNEQKQLFVEQHKHYLDEIIEQISEFSKRVILADANLDKVLSAYNKHRDKPIREQAEN
IIHLFTLTNLGAPAAFKYFDTTIDRKRYTSTKEVLDATLIHQSITGLYETRIDLSQLGGDEGA
DKRTADGSEFESPKKKRKV (SEQ ID NO: 433)

| | | Base | | | Editing |
|---|---|---|---|---|---|
| Plasmid Name | mRNA entity | Editor | Deaminase | PAM | window |
| pHRB-419 | 2926, 3991, | ABE | TadA*8.20 | NGG | 3-9 |
| | 4247 | | | | |

MSEVEFSHEYWMRHALTLAKRARDEREVPVGAVLVLNNRVIGEGWNRAIGLHDPTAHAEIMAL
RQGGLVMQNYRLYDATLYSTFEPCVMCAGAMIHSRIGRVVFGVRNAKTGAAGSLMDVLHHPGM
NHRVEITEGILADECAALLCRFFRMPRRVFNAQKKAQSSTDSGGSSGGSSGSETPGTSESATP
ESSGGSSGGSDKKYSIGLAIGTNSVGWAVITDEYKVPSKKFKVLGNTDRHSIKKNLIGALLFD
SGETAEATRLKRTARRRYTRRKNRICYLQEIFSNEMAKVDDSFFHRLEESFLVEEDKKHERHP
IFGNIVDEVAYHEKYPTIYHLRKKLVDSTDKADLRLIYLALAHMIKFRGHFLIEGDLNPDNSD
VDKLFIQLVQTYNQLFEENPINASGVDAKAILSARLSKSRRLENLIAQLPGEKKNGLFGNLIA
LSLGLTPNFKSNFDLAEDAKLQLSKDTYDDDLDNLLAQIGDQYADLFLAAKNLSDAILLSDIL
RVNTEITKAPLSASMIKRYDEHHQDLTLLKALVRQQLPEKYKEIFFDQSKNGYAGYIDGGASQ
EEFYKFIKPILEKMDGTEELLVKLNREDLLRKQRTFDNGSIPHQIHLGELHAILRRQEDFYPF
LKDNREKIEKILTFRIPYYVGPLARGNSRFAWMTRKSEETITPWNFEEVVDKGASAQSFIERM
TNFDKNLPNEKVLPKHSLLYEYFTVYNELTKVKYVTEGMRKPAFLSGEQKKAIVDLLFKTNRK
VTVKQLKEDYFKKIECFDSVEISGVEDRFNASLGTYHDLLKIIKDKDFLDNEENEDILEDIVL
TLTLFEDREMIEERLKTYAHLFDDKVMKQLKRRRYTGWGRLSRKLINGIRDKQSGKTILDFLK
SDGFANRNFMQLIHDDSLTFKEDIQKAQVSGQGDSLHEHIANLAGSPAIKKGILQTVKVVDEL
VKVMGRHKPENIVIEMARENQTTQKGQKNSRERMKRIEEGIKELGSQILKEHPVENTQLQNEK
LYLYYLQNGRDMYVDQELDINRLSDYDVDHIVPQSFLKDDSIDNKVLTRSDKNRGKSDNVPSE
EVVKKMKNYWRQLLNAKLITQRKFDNLTKAERGGLSELDKAGFIKRQLVETRQITKHVAQILD
SRMNTKYDENDKLIREVKVITLKSKLVSDFRKDFQFYKVREINNYHHAHDAYLNAVVGTALIK
KYPKLESEFVYGDYKVYDVRKMIAKSEQEIGKATAKYFFYSNIMNFFKTEITLANGEIRKRPL
IETNGETGEIVWDKGRDFATVRKVLSMPQVNIVKKTEVQTGGFSKESILPKRNSDKLIARKKD
WDPKKYGGFDSPTVAYSVLVVAKVEKGKSKKLKSVKELLGITIMERSSFEKNPIDFLEAKGYK
EVKKDLIIKLPKYSLFELENGRKRMLASAGELQKGNELALPSKYVNFLYLASHYEKLKGSPED
NEQKQLFVEQHKHYLDEIIEQISEFSKRVILADANLDKVLSAYNKHRDKPIREQAENIIHLFT
LTNLGAPAAFKYFDTTIDRKRYTSTKEVLDATLIHQSITGLYETRIDLSQLGGDEGADKRTAD
GSEFESPKKKRKV (SEQ ID NO: 434)

| | | Base | | | Editing |
|---|---|---|---|---|---|
| Plasmid Name | mRNA entity | Editor | Deaminase | PAM | window |
| pHRB-429 | 2889 | ABE | TadA*8.20 | NNGR | 5-14 |
| | | | | RT | |

MSEVEFSHEYWMRHALTLAKRARDEREVPVGAVLVLNNRVIGEGWNRAIGLHDPTAHAEIMAL
RQGGLVMQNYRLYDATLYSTFEPCVMCAGAMIHSRIGRVVFGVRNAKTGAAGSLMDVLHHPGM
NHRVEITEGILADECAALLCRFFRMPRRVFNAQKKAQSSTDSGGSSGGSSGSETPGTSESATP
ESSGGSSGGSKRNYILGLAIGITSVGYGIIDYETRDVIDAGVRLFKEANVENNEGRRSKRGAR
RLKRRRRHRIQRVKKLLFDYNLLTDHSELSGINPYEARVKGLSQKLSEEEFSAALLHLAKRRG
VHNVNEVEEDTGNELSTKEQISRNSKALEEKYVAELQLERLKKDGEVRGSINRFKTSDYVKEA
KQLLKVQKAYHQLDQSFIDTYIDLLETRRTYYEGPGEGSPFGWKDIKEWYEMLMGHCTYFPEE
LRSVKYAYNADLYNALNDLNNLVITRDENEKLEYYEKFQIIENVFKQKKKPTLKQIAKEILVN
EEDIKGYRVTSTGKPEFTNLKVYHDIKDITARKEIIENAELLDQIAKILTIYQSSEDIQEELT
NLNSELTQEEIEQISNLKGYTGTHNLSLKAINLILDELWHTNDNQIAIFNRLKLVPKKVDLSQ
QKEIPTTLVDDFILSPVVKRSFIQSIKVINAIIKKYGLPNDIIIELAREKNSKDAQKMINEMQ
KRNRQTNERIEEIIRTTGKENAKYLIEKIKLHDMQEGKCLYSLEAIPLEDLLNNPFNYEVDHI
IPRSVSFDNSFNNKVLVKQEENSKKGNRTPFQYLSSSDSKISYETFKKHILNLAKGKGRISKT
KKEYLLEERDINRFSVQKDFINRNLVDTRYATRGLMNLLRSYFRVNNLDVKVKSINGGFTSFL
RRKWKFKKERNKGYKHHAEDALIIANADFIFKEWKKLDKAKKVMENQMFEEKQAESMPEIETE
QEYKEIFITPHQIKHIKDFKDYKYSHRVDKKPNRELINDTLYSTRKDDKGNTLIVNNLNGLYD
KDNDKLKKLINKSPEKLLMYHHDPQTYQKLKLIMEQYGDEKNPLYKYYEETGNYLTKYSKKDN
GPVIKKIKYYGNKLNAHLDITDDYPNSRNKVVKLSLKPYRFDVYLDNGVYKFVTVKNLDVIKK
ENYYEVNSKCYEEAKKLKKISNQAEFIASFYNNDLIKINGELYRVIGVNNDLLNRIEVNMIDI
TYREYLENMNDKRPPRIIKTIASKTQSIKKYSTDILGNLYEVKSKKHPQIIKKGEGADKRTAD
GSEFESPKKKRKV (SEQ ID NO: 435)

| | | Base | | | Editing |
|---|---|---|---|---|---|
| Plasmid Name | mRNA entity | Editor | Deaminase | PAM | window |
| pHRB-434 | 2892 | ABE | TadA*8.20 | NNNR | 5-14 |
| | | | | RT | |

MSEVEFSHEYWMRHALTLAKRARDEREVPVGAVLVLNNRVIGEGWNRAIGLHDPTAHAEIMAL
RQGGLVMQNYRLYDATLYSTFEPCVMCAGAMIHSRIGRVVFGVRNAKTGAAGSLMDVLHHPGM
NHRVEITEGILADECAALLCRFFRMPRRVFNAQKKAQSSTDSGGSSGGSSGSETPGTSESATP
ESSGGSSGGSKRNYILGLAIGITSVGYGIIDYETRDVIDAGVRLFKEANVENNEGRRSKRGAR
RLKRRRRHRIQRVKKLLFDYNLLTDHSELSGINPYEARVKGLSQKLSEEEFSAALLHLAKRRG
VHNVNEVEEDTGNELSTKEQISRNSKALEEKYVAELQLERLKKDGEVRGSINRFKTSDYVKEA
KQLLKVQKAYHQLDQSFIDTYIDLLETRRTYYEGPGEGSPFGWKDIKEWYEMLMGHCTYFPEE
LRSVKYAYNADLYNALNDLNNLVITRDENEKLEYYEKFQIIENVFKQKKKPTLKQIAKEILVN
EEDIKGYRVTSTGKPEFTNLKVYHDIKDITARKEIIENAELLDQIAKILTIYQSSEDIQEELT
NLNSELTQEEIEQISNLKGYTGTHNLSLKAINLILDELWHTNDNQIAIFNRLKLVPKKVDLSQ
QKEIPTTLVDDFILSPVVKRSFIQSIKVINAIIKKYGLPNDIIIELAREKNSKDAQKMINEMQ
KRNRQTNERIEEIIRTTGKENAKYLIEKIKLHDMQEGKCLYSLEAIPLEDLLNNPFNYEVDHI
IPRSVSFDNSFNNKVLVKQEENSKKGNRTPFQYLSSSDSKISYETFKKHILNLAKGKGRISKT
KKEYLLEERDINRFSVQKDFINRNLVDTRYATRGLMNLLRSYFRVNNLDVKVKSINGGFTSFL
RRKWKFKKERNKGYKHHAEDALIIANADFIFKEWKKLDKAKKVMENQMFEEKQAESMPEIETE
QEYKEIFITPHQIKHIKDFKDYKYSHRVDKKPNRKLINDTLYSTRKDDKGNTLIVNNLNGLYD
KDNDKLKKLINKSPEKLLMYHHDPQTYQKLKLIMEQYGDEKNPLYKYYEETGNYLTKYSKKDN
GPVIKKIKYYGNKLNAHLDITDDYPNSRNKVVKLSLKPYRFDVYLDNGVYKFVTVKNLDVIKK
ENYYEVNSKCYEEAKKLKKISNQAEFIASFYKNDLIKINGELYRVIGVNNDLLNRIEVNMIDI
TYREYLENMNDKRPPHIIKTIASKTQSIKKYSTDILGNLYEVKSKKHPQIIKKGGSPKKKRKV
SSDYKDHDGDYKDHDIDYKDDDDKEGADKRTADGSEFESPKKKRKV (SEQ ID NO: 436)

| | | Base | | | Editing |
|---|---|---|---|---|---|
| Plasmid Name | mRNA entity | Editor | Deaminase | PAM | window |
| pRW-006 | 4018 | ABE | TadA*8.20 | NRCH | 3-9 |

MSEVEFSHEYWMRHALTLAKRARDEREVPVGAVLVLNNRVIGEGWNRAIGLHDPTAHAEIMAL
RQGGLVMQNYRLYDATLYSTFEPCVMCAGAMIHSRIGRVVFGVRNAKTGAAGSLMDVLHHPGM
NHRVEITEGILADECAALLCRFFRMPRRVFNAQKKAQSSTDSGGSSGGSSGSETPGTSESATP
ESSGGSSGGSDKKYSIGLAIGTNSVGWAVITDEYKVPSKKFKVLGNTDRHSIKKNLIGALLFD
SGETAEATRLKRTARRRYTRRKNRICYLQEIFSNEMAKVDDSFFHRLEESFLVEEDKKHERHP
IFGNIVDEVAYHEKYPTIYHLRKKLVDSTDKADLRLIYLALAHMIKFRGHFLIEGDLNPDNSD
VDKLFIQLVQTYNQLFEENPINASGVDAKAILSARLSKSRRLENLIAQLPGEKKNGLFGNLIA
LSLGLTPNFKSNFDLAEDAKLQLSKDTYDDDLDNLLAQIGDQYADLFLAAKNLSDAILLSDIL
RVNTEITKAPLSASMVKRYDEHHQDLTLLKALVRQQLPEKYKEIFFDQSKNGYAGYIDGGASQ
EEFYKFIKPILEKMDGTEELLVKLNREDLLRKQRTFDNGIIPHQIHLGELHAILRRQGDFYPF
LKDNREKIEKILTFRIPYYVGPLARGNSRFAWMTRKSEETITPWNFEEVVDKGASAQSFIERM
TNFDKNLPNEKVLPKHSLLYEYFTVYNELTKVKYVTEGMRKPAFLSGEQKKAIVDLLFKTNRK
VTVKQLKEDYFKKIECFDSVEISGVEDRFNASLGTYHDLLKIIKDKDFLDNEENEDILEDIVL
TLTLFEDREMIEERLKTYAHLFDDKVMKQLKRLRYTGWGRLSRKLINGIRDKQSGKTILDFLK
SDGFANRNFMQLIHDDSLTFKEDIQKAQVSGQGDSLHEHIANLAGSPAIKKGILQTVKVVDEL
VKVMGGHKPENIVIEMARENQTTQKGQKNSRERMKRIEEGIKELGSQILKEHPVENTQLQNEK
LYLYYLQNGRDMYVDQELDINRLSDYDVDHIVPQSFLKDDSIDNKVLTRSDKNRGKSDNVPSE
EVVKKMKNYWRQLLNAKLITQRKFDNLTKAERGGLSELDKAGFIKRQLVETRQITKHVAQILD
SRMNTKYDENDKLIREVKVITLKSKLVSDFRKDFQFYKVREINNYHHAHDAYLNAVVGTALIK
KYPKLESEFVYGDYKVYDVRKMIAKSEQEIGKATAKYFFYSNIMNFFKTEITLANGEIRKRPL
IETNGETGEIVWDKGRDFATVRKVLSMPQVNIVKKTEVQTGGFSKESILPKGNSDKLIARKKD
WDPKKYGGFNSPTVAYSVLVVAKVEKGKSKKLKSVKELLGITIMERSSFEKNPIDFLEAKGYK
EVKKDLIIKLPKYSLFELENGRKRMLASAGVLQKGNELALPSKYVNFLYLASHYEKLKGSPED
NEQKQLFVEQHKHYLDEIIEQISEFSKRVILADANLDKVLSAYNKHRDKPIREQAENIIHLFT
LTNLGAPAAFKYFDTTINRKQYNTTKEVLDATLIRQSITGLYETRIDLSQLGGDEGADKRTAD
GSEFESPKKKRKV (SEQ ID NO: 437)

| | | Base | | | Editing |
|---|---|---|---|---|---|
| Plasmid Name | mRNA entity | Editor | Deaminase | PAM | window |
| PST-112 | 2869 | CBE | ppAPOBEC1 | NG | 4-9 |

MKRTADGSEFESPKKKRKVTSEKGPSTGDPTLRRRIESWEFDVFYDPRELRKETCLLYEIKWG
MSRKIWRSSGKNTTNHVEVNFIKKFTSERRFHSSISCSITWFLSWSPCWECSQAIREFLSQHP
GVTLVIYVARLFWHMDQRNRQGLRDLVNSGVTIQIMRASEYYHCWRNFVNYPPGDEAHWPQYP
PLWMMLYALELHCIILSLPPCLKISRRWQNHLAFFRLHLQNCHYQTIPPHILLATGLIHPSVT
WRSGGSSGGSSGSETPGTSESATPESSGGSSGGSDKKYSIGLAIGTNSVGWAVITDEYKVPSK
KFKVLGNTDRHSIKKNLIGALLFDSGETAEATRLKRTARRRYTRRKNRICYLQEIFSNEMAKV
DDSFFHRLEESFLVEEDKKHERHPIFGNIVDEVAYHEKYPTIYHLRKKLVDSTDKADLRLIYL
ALAHMIKFRGHFLIEGDLNPDNSDVDKLFIQLVQTYNQLFEENPINASGVDAKAILSARLSKS
RRLENLIAQLPGEKKNGLFGNLIALSLGLTPNFKSNFDLAEDAKLQLSKDTYDDDLDNLLAQI
GDQYADLFLAAKNLSDAILLSDILRVNTEITKAPLSASMIKRYDEHHQDLTLLKALVRQQLPE
KYKEIFFDQSKNGYAGYIDGGASQEEFYKFIKPILEKMDGTEELLVKLNREDLLRKQRTFDNG
SIPHQIHLGELHAILRRQEDFYPFLKDNREKIEKILTFRIPYYVGPLARGNSRFAWMTRKSEE
TITPWNFEEVVDKGASAQSFIERMTNFDKNLPNEKVLPKHSLLYEYFTVYNELTKVKYVTEGM
RKPAFLSGEQKKAIVDLLFKTNRKVTVKQLKEDYFKKIECFDSVEISGVEDRFNASLGTYHDL
LKIIKDKDFLDNEENEDILEDIVLTLTLFEDREMIEERLKTYAHLFDDKVMKQLKRRRYTGWG
RLSRKLINGIRDKQSGKTILDFLKSDGFANRNFMQLIHDDSLTFKEDIQKAQVSGQGDSLHEH
IANLAGSPAIKKGILQTVKVVDELVKVMGRHKPENIVIEMARENQTTQKGQKNSRERMKRIEE
GIKELGSQILKEHPVENTQLQNEKLYLYYLQNGRDMYVDQELDINRLSDYDVDHIVPQSFLKD
DSIDNKVLTRSDKNRGKSDNVPSEEVVKKMKNYWRQLLNAKLITQRKFDNLTKAERGGLSELD
KAGFIKRQLVETRQITKHVAQILDSRMNTKYDENDKLIREVKVITLKSKLVSDFRKDFQFYKV
REINNYHHAHDAYLNAVVGTALIKKYPKLESEFVYGDYKVYDVRKMIAKSEQEIGKATAKYFF
YSNIMNFFKTEITLANGEIRKRPLIETNGETGEIVWDKGRDFATVRKVLSMPQVNIVKKTEVQ
TGGFSKESIRPKRNSDKLIARKKDWDPKKYGGFVSPTVAYSVLVVAKVEKGKSKKLKSVKELL
GITIMERSSFEKNPIDFLEAKGYKEVKKDLIIKLPKYSLFELENGRKRMLASARFLQKGNELA
LPSKYVNFLYLASHYEKLKGSPEDNEQKQLFVEQHKHYLDEIIEQISEFSKRVILADANLDKV
LSAYNKHRDKPIREQAENIIHLFTLTNLGAPRAFKYFDTTIDRKAYRSTKEVLDATLIHQSIT
GLYETRIDLSQLGGDSGGSGGSGGSTNLSDIIEKETGKQLVIQESILMLPEEVEEVIGNKPES
DILVHTAYDESTDENVMLLTSDAPEYKPWALVIQDSNGENKIKMLSGGSGGSGGSTNLSDIIE
KETGKQLVIQESILMLPEEVEEVIGNKPESDILVHTAYDESTDENVMLLTSDAPEYKPWALVI
QDSNGENKIKMLSGGSKRTADGSEFESPKKKRKV (SEQ ID NO: 438)

| | | Base | | | Editing |
|---|---|---|---|---|---|
| Plasmid Name | mRNA entity | Editor | Deaminase | PAM | window |
| pHRB-402 | 2744, 4476 | CBE | ppAPOBEC1 | NGA | 4-9 |

MTSEKGPSTGDPTLRRRIESWEFDVFYDPRELRKETCLLYEIKWGMSRKIWRSSGKNTTNHVE
VNFIKKFTSERRFHSSISCSITWFLSWSPCWECSQAIREFLSQHPGVTLVIYVARLFWHMDQR
NRQGLRDLVNSGVTIQIMRASEYYHCWRNFVNYPPGDEAHWPQYPPLWMMLYALELHCIILSL
PPCLKISRRWQNHLAFFRLHLQNCHYQTIPPHILLATGLIHPSVTWRSGGSSGGSSGSETPGT
SESATPESSGGSSGGSDKKYSIGLAIGTNSVGWAVITDEYKVPSKKFKVLGNTDRHSIKKNLI
GALLFDSGETAEATRLKRTARRRYTRRKNRICYLQEIFSNEMAKVDDSFFHRLEESFLVEEDK
KHERHPIFGNIVDEVAYHEKYPTIYHLRKKLVDSTDKADLRLIYLALAHMIKFRGHFLIEGDL
NPDNSDVDKLFIQLVQTYNQLFEENPINASGVDAKAILSARLSKSRRLENLIAQLPGEKKNGL
FGNLIALSLGLTPNFKSNFDLAEDAKLQLSKDTYDDDLDNLLAQIGDQYADLFLAAKNLSDAI
LLSDILRVNTEITKAPLSASMIKRYDEHHQDLTLLKALVRQQLPEKYKEIFFDQSKNGYAGYI
DGGASQEEFYKFIKPILEKMDGTEELLVKLNREDLLRKQRTFDNGSIPHQIHLGELHAILRRQ
EDFYPFLKDNREKIEKILTFRIPYYVGPLARGNSRFAWMTRKSEETITPWNFEEVVDKGASAQ
SFIERMTNFDKNLPNEKVLPKHSLLYEYFTVYNELTKVKYVTEGMRKPAFLSGEQKKAIVDLL
FKTNRKVTVKQLKEDYFKKIECFDSVEISGVEDRFNASLGTYHDLLKIIKDKDFLDNEENEDI
LEDIVLTLTLFEDREMIEERLKTYAHLFDDKVMKQLKRRRYTGWGRLSRKLINGIRDKQSGKT
ILDFLKSDGFANRNFMQLIHDDSLTFKEDIQKAQVSGQGDSLHEHIANLAGSPAIKKGILQTV
KVVDELVKVMGRHKPENIVIEMARENQTTQKGQKNSRERMKRIEEGIKELGSQILKEHPVENT
QLQNEKLYLYYLQNGRDMYVDQELDINRLSDYDVDHIVPQSFLKDDSIDNKVLTRSDKNRGKS
DNVPSEEVVKKMKNYWRQLLNAKLITQRKFDNLTKAERGGLSELDKAGFIKRQLVETRQITKH
VAQILDSRMNTKYDENDKLIREVKVITLKSKLVSDFRKDFQFYKVREINNYHHAHDAYLNAVV
GTALIKKYPKLESEFVYGDYKVYDVRKMIAKSEQEIGKATAKYFFYSNIMNFFKTEITLANGE
IRKRPLIETNGETGEIVWDKGRDFATVRKVLSMPQVNIVKKTEVQTGGFSKESILPKRNSDKL
IARKKDWDPKKYGGFVSPTVAYSVLVVAKVEKGKSKKLKSVKELLGITIMERSSFEKNPIDFL
EAKGYKEVKKDLIIKLPKYSLFELENGRKRMLASARELQKGNELALPSKYVNFLYLASHYEKL
KGSPEDNEQKQLFVEQHKHYLDEIIEQISEFSKRVILADANLDKVLSAYNKHRDKPIREQAEN
IIHLFTLTNLGAPAAFKYFDTTIDRKQYRSTKEVLDATLIHQSITGLYETRIDLSQLGGDSGG
SGGSGGSTNLSDIIEKETGKQLVIQESILMLPEEVEEVIGNKPESDILVHTAYDESTDENVML
LTSDAPEYKPWALVIQDSNGENKIKMLSGGSGGSGGSTNLSDIIEKETGKQLVIQESILMLPE
EVEEVIGNKPESDILVHTAYDESTDENVMLLTSDAPEYKPWALVIQDSNGENKIKMLSGGSKR
TADGSEFES PKKKRKV (SEQ ID NO: 439)

| | | Base | | | Editing |
|---|---|---|---|---|---|
| Plasmid Name | mRNA entity | Editor | Deaminase | PAM | window |
| pST-110 | 2867, 3628 | CBE | ppAPOBEC1 | NGC | 4-9 |

MKRTADGSEFESPKKKRKVTSEKGPSTGDPTLRRRIESWEFDVFYDPRELRKETCLLYEIKWG
MSRKIWRSSGKNTTNHVEVNFIKKFTSERRFHSSISCSITWFLSWSPCWECSQAIREFLSQHP
GVTLVIYVARLFWHMDQRNRQGLRDLVNSGVTIQIMRASEYYHCWRNFVNYPPGDEAHWPQYP
PLWMMLYALELHCIILSLPPCLKISRRWQNHLAFFRLHLQNCHYQTIPPHILLATGLIHPSVT
WRSGGSSGGSSGSETPGTSESATPESSGGSSGGSDKKYSIGLAIGTNSVGWAVITDEYKVPSK
KFKVLGNTDRHSIKKNLIGALLFDSGETAEATRLKRTARRRYTRRKNRICYLQEIFSNEMAKV
DDSFFHRLEESFLVEEDKKHERHPIFGNIVDEVAYHEKYPTIYHLRKKLVDSTDKADLRLIY ALAHMIKFRGHFLIEGDLNPDNSDVDKLFIQLVQTYNQLFEENPINASGVDAKAILSARLSKS
RRLENLIAQLPGEKKNGLFGNLIALSLGLTPNFKSNFDLAEDAKLQLSKDTYDDDLDNLLAQI
GDQYADLFLAAKNLSDAILLSDILRVNTEITKAPLSASMVKRYDEHHQDLTLLKALVRQQLPE
KYKEIFFDQSKNGYAGYIDGGASQEEFYKFIKPILEKMDGTEELLVKLNREDLLRKQRTFDNG
IIPHQIHLGELHAILRRQGDFYPFLKDNREKIEKILTFRIPYYVGPLARGNSRFAWMTRKSEE
TITPWNFEEVVDKGASAQSFIERMTNFDKNLPNEKVLPKHSLLYEYFTVYNELTKVKYVTEGM
RKPAFLSGEQKKAIVDLLFKTNRKVTVKQLKEDYFKKIECFDSVEISGVEDRFNASLGTYHDL
LKIIKDKDFLDNEENEDILEDIVLTLTLFEDREMIEERLKTYAHLFDDKVMKQLKRLRYTGWG
RLSRKLINGIRDKQSGKTILDFLKSDGFANRNFMQLIHDDSLTFKEDIQKAQVSGQGDSLHEH
IANLAGSPAIKKGILQTVKVVDELVKVMGGHKPENIVIEMARENQTTQKGQKNSRERMKRIEE
GIKELGSQILKEHPVENTQLQNEKLYLYYLQNGRDMYVDQELDINRLSDYDVDHIVPQSFLKD
DSIDNKVLTRSDKNRGKSDNVPSEEVVKKMKNYWRQLLNAKLITQRKFDNLTKAERGGLSELD
KAGFIKRQLVETRQITKHVAQILDSRMNTKYDENDKLIREVKVITLKSKLVSDFRKDFQFYKV
REINNYHHAHDAYLNAVVGTALIKKYPKLESEFVYGDYKVYDVRKMIAKSEQEIGKATAKYFF
YSNIMNFFKTEITLANGEIRKRPLIETNGETGEIVWDKGRDFATVRKVLSMPQVNIVKKTEVQ
TGGFSKESILPKGNSDKLIARKKDWDPKKYGGFMQPTVAYSVLVVAKVEKGKSKKLKSVKELL
GITIMERSSFEKNPIDFLEAKGYKEVKKDLIIKLPKYSLFELENGRKRMLASAKFLQKGNELA
LPSKYVNFLYLASHYEKLKGSPEDNEQKQLFVEQHKHYLDEIIEQISEFSKRVILADANLDKV
LSAYNKHRDKPIREQAENIIHLFTLTNLGAPRAFKYFDTTIARKEYRSTKEVLDATLIHQSIT
GLYETRIDLSQLGGDSGGSGGSGGSTNLSDIIEKETGKQLVIQESILMLPEEVEEVIGNKPES
DILVHTAYDESTDENVMLLTSDAPEYKPWALVIQDSNGENKIKMLSGGSGGSGGSTNLSDIIE
KETGKQLVIQESILMLPEEVEEVIGNKPESDILVHTAYDESTDENVMLLTSDAPEYKPWALVI
QDSNGENKIKMLSGGSKRTADGSEFESPKKKRKV (SEQ ID NO: 440)

| | | Base | | | Editing |
|---|---|---|---|---|---|
| Plasmid Name | mRNA entity | Editor | Deaminase | PAM | window |
| pHRB-397 | 3922, 3984, | CBE | ppAPOBEC1 | NGG | 4-9 |
| | 4246 | | | | |

MTSEKGPSTGDPTLRRRIESWEFDVFYDPRELRKETCLLYEIKWGMSRKIWRSSGKNTTNHVE
VNFIKKFTSERRFHSSISCSITWFLSWSPCWECSQAIREFLSQHPGVTLVIYVARLFWHMDQR
NRQGLRDLVNSGVTIQIMRASEYYHCWRNFVNYPPGDEAHWPQYPPLWMMLYALELHCIILSL
PPCLKISRRWQNHLAFFRLHLQNCHYQTIPPHILLATGLIHPSVTWRSGGSSGGSSGSETPGT
SESATPESSGGSSGGSDKKYSIGLAIGTNSVGWAVITDEYKVPSKKFKVLGNTDRHSIKKNLI
GALLFDSGETAEATRLKRTARRRYTRRKNRICYLQEIFSNEMAKVDDSFFHRLEESFLVEEDK
KHERHPIFGNIVDEVAYHEKYPTIYHLRKKLVDSTDKADLRLIYLALAHMIKFRGHFLIEGDL
NPDNSDVDKLFIQLVQTYNQLFEENPINASGVDAKAILSARLSKSRRLENLIAQLPGEKKNGL
FGNLIALSLGLTPNFKSNFDLAEDAKLQLSKDTYDDDLDNLLAQIGDQYADLFLAAKNLSDAI
LLSDILRVNTEITKAPLSASMIKRYDEHHQDLTLLKALVRQQLPEKYKEIFFDQSKNGYAGYI
DGGASQEEFYKFIKPILEKMDGTEELLVKLNREDLLRKQRTFDNGSIPHQIHLGELHAILRRQ
EDFYPFLKDNREKIEKILTFRIPYYVGPLARGNSRFAWMTRKSEETITPWNFEEVVDKGASAQ
SFIERMTNFDKNLPNEKVLPKHSLLYEYFTVYNELTKVKYVTEGMRKPAFLSGEQKKAIVDLL
FKTNRKVTVKQLKEDYFKKIECFDSVEISGVEDRFNASLGTYHDLLKIIKDKDFLDNEENEDI
LEDIVLTLTLFEDREMIEERLKTYAHLFDDKVMKQLKRRRYTGWGRLSRKLINGIRDKQSGKT
ILDFLKSDGFANRNFMQLIHDDSLTFKEDIQKAQVSGQGDSLHEHIANLAGSPAIKKGILQTV
KVVDELVKVMGRHKPENIVIEMARENQTTQKGQKNSRERMKRIEEGIKELGSQILKEHPVENT
QLQNEKLYLYYLQNGRDMYVDQELDINRLSDYDVDHIVPQSFLKDDSIDNKVLTRSDKNRGKS
DNVPSEEVVKKMKNYWRQLLNAKLITQRKFDNLTKAERGGLSELDKAGFIKRQLVETRQITKH
VAQILDSRMNTKYDENDKLIREVKVITLKSKLVSDFRKDFQFYKVREINNYHHAHDAYLNAVV
GTALIKKYPKLESEFVYGDYKVYDVRKMIAKSEQEIGKATAKYFFYSNIMNFFKTEITLANGE
IRKRPLIETNGETGEIVWDKGRDFATVRKVLSMPQVNIVKKTEVQTGGFSKESILPKRNSDKL
IARKKDWDPKKYGGFDSPTVAYSVLVVAKVEKGKSKKLKSVKELLGITIMERSSFEKNPIDFL
EAKGYKEVKKDLIIKLPKYSLFELENGRKRMLASAGELQKGNELALPSKYVNFLYLASHYEKL
KGSPEDNEQKQLFVEQHKHYLDEIIEQISEFSKRVILADANLDKVLSAYNKHRDKPIREQAEN
IIHLFTLTNLGAPAAFKYFDTTIDRKRYTSTKEVLDATLIHQSITGLYETRIDLSQLGGDSGG
SGGSGGSTNLSDIIEKETGKQLVIQESILMLPEEVEEVIGNKPESDILVHTAYDESTDENVML
LTSDAPEYKPWALVIQDSNGENKIKMLSGGSGGSGGSTNLSDIIEKETGKQLVIQESILMLPE
EVEEVIGNKPESDILVHTAYDESTDENVMLLTSDAPEYKPWALVIQDSNGENKIKMLSGGSKR
TADGSEFESPKKKRKV (SEQ ID NO: 441)

| | | Base | | | Editing |
|---|---|---|---|---|---|
| Plasmid Name | mRNA entity | Editor | Deaminase | PAM | window |
| pHRB-407 | 2745 | CBE | ppAPOBEC1 | NNGR | 3-12 |
| | | | | RT | |

MTSEKGPSTGDPTLRRRIESWEFDVFYDPRELRKETCLLYEIKWGMSRKIWRSSGKNTTNHVE
VNFIKKFTSERRFHSSISCSITWFLSWSPCWECSQAIREFLSQHPGVTLVIYVARLFWHMDQR
NRQGLRDLVNSGVTIQIMRASEYYHCWRNFVNYPPGDEAHWPQYPPLWMMLYALELHCIILSL
PPCLKISRRWQNHLAFFRLHLQNCHYQTIPPHILLATGLIHPSVTWRSGGSSGGSSGSETPGT
SESATPESSGGSSGGSGKRNYILGLAIGITSVGYGIIDYETRDVIDAGVRLFKEANVENNEGR
RSKRGARRLKRRRRHRIQRVKKLLFDYNLLTDHSELSGINPYEARVKGLSQKLSEEEFSAALL
HLAKRRGVHNVNEVEEDTGNELSTKEQISRNSKALEEKYVAELQLERLKKDGEVRGSINRFKT
SDYVKEAKQLLKVQKAYHQLDQSFIDTYIDLLETRRTYYEGPGEGSPFGWKDIKEWYEMLMGH
CTYFPEELRSVKYAYNADLYNALNDLNNLVITRDENEKLEYYEKFQIIENVFKQKKKPTLKQI
AKEILVNEEDIKGYRVTSTGKPEFTNLKVYHDIKDITARKEIIENAELLDQIAKILTIYQSSE
DIQEELTNLNSELTQEEIEQISNLKGYTGTHNLSLKAINLILDELWHTNDNQIAIFNRLKLVP
KKVDLSQQKEIPTTLVDDFILSPVVKRSFIQSIKVINAIIKKYGLPNDIIIELAREKNSKDAQ
KMINEMQKRNRQTNERIEEIIRTTGKENAKYLIEKIKLHDMQEGKCLYSLEAIPLEDLLNNPF
NYEVDHIIPRSVSFDNSFNNKVLVKQEENSKKGNRTPFQYLSSSDSKISYETFKKHILNLAKG
KGRISKTKKEYLLEERDINRFSVQKDFINRNLVDTRYATRGLMNLLRSYFRVNNLDVKVKSIN
GGFTSFLRRKWKFKKERNKGYKHHAEDALIIANADFIFKEWKKLDKAKKVMENQMFEEKQAES
MPEIETEQEYKEIFITPHQIKHIKDFKDYKYSHRVDKKPNRELINDTLYSTRKDDKGNTLIVN
NLNGLYDKDNDKLKKLINKSPEKLLMYHHDPQTYQKLKLIMEQYGDEKNPLYKYYEETGNYLT
KYSKKDNGPVIKKIKYYGNKLNAHLDITDDYPNSRNKVVKLSLKPYRFDVYLDNGVYKFVTVK
NLDVIKKENYYEVNSKCYEEAKKLKKISNQAEFIASFYNNDLIKINGELYRVIGVNNDLLNRI
EVNMIDITYREYLENMNDKRPPRIIKTIASKTQSIKKYSTDILGNLYEVKSKKHPQIIKKGGS
PKKKRKVSSDYKDHDGDYKDHDIDYKDDDDKSGGSGGSGGSTNLSDIIEKETGKQLVIQESIL
MLPEEVEEVIGNKPESDILVHTAYDESTDENVMLLTSDAPEYKPWALVIQDSNGENKIKMLSG
GSGGSGGSTNLSDIIEKETGKQLVIQESILMLPEEVEEVIGNKPESDILVHTAYDESTDENVM
LLTSDAPEYKPWALVIQDSNGENKIKMLSGGSKRTADGSEFESPKKKRKV (SEQ ID NO: 442)

| | | Base | | | Editing |
|---|---|---|---|---|---|
| Plasmid Name | mRNA entity | Editor | Deaminase | PAM | window |
| pHRB-412 | 2225 | CBE | ppAPOBEC1 | NNNR | 3-12 |
| | | | | RT | |

MTSEKGPSTGDPTLRRRIESWEFDVFYDPRELRKETCLLYEIKWGMSRKIWRSSGKNTTNHVE
VNFIKKFTSERRFHSSISCSITWFLSWSPCWECSQAIREFLSQHPGVTLVIYVARLFWHMDQR
NRQGLRDLVNSGVTIQIMRASEYYHCWRNFVNYPPGDEAHWPQYPPLWMMLYALELHCIILSL
PPCLKISRRWQNHLAFFRLHLQNCHYQTIPPHILLATGLIHPSVTWRSGGSSGGSSGSETPGT
SESATPESSGGSSGGSGKRNYILGLAIGITSVGYGIIDYETRDVIDAGVRLFKEANVENNEGR
RSKRGARRLKRRRRHRIQRVKKLLFDYNLLTDHSELSGINPYEARVKGLSQKLSEEEFSAALL
HLAKRRGVHNVNEVEEDTGNELSTKEQISRNSKALEEKYVAELQLERLKKDGEVRGSINRFKT
SDYVKEAKQLLKVQKAYHQLDQSFIDTYIDLLETRRTYYEGPGEGSPFGWKDIKEWYEMLMGH
CTYFPEELRSVKYAYNADLYNALNDLNNLVITRDENEKLEYYEKFQIIENVFKQKKKPTLKQI
AKEILVNEEDIKGYRVTSTGKPEFTNLKVYHDIKDITARKEIIENAELLDQIAKILTIYQSSE
DIQEELTNLNSELTQEEIEQISNLKGYTGTHNLSLKAINLILDELWHTNDNQIAIFNRLKLVP
KKVDLSQQKEIPTTLVDDFILSPVVKRSFIQSIKVINAIIKKYGLPNDIIIELAREKNSKDAQ
KMINEMQKRNRQTNERIEEIIRTTGKENAKYLIEKIKLHDMQEGKCLYSLEAIPLEDLLNNPF
NYEVDHIIPRSVSFDNSFNNKVLVKQEENSKKGNRTPFQYLSSSDSKISYETFKKHILNLAKG
KGRISKTKKEYLLEERDINRFSVQKDFINRNLVDTRYATRGLMNLLRSYFRVNNLDVKVKSIN
GGFTSFLRRKWKFKKERNKGYKHHAEDALIIANADFIFKEWKKLDKAKKVMENQMFEEKQAES
MPEIETEQEYKEIFITPHQIKHIKDFKDYKYSHRVDKKPNRKLINDTLYSTRKDDKGNTLIVN
NLNGLYDKDNDKLKKLINKSPEKLLMYHHDPQTYQKLKLIMEQYGDEKNPLYKYYEETGNYLT
KYSKKDNGPVIKKIKYYGNKLNAHLDITDDYPNSRNKVVKLSLKPYRFDVYLDNGVYKFVTVK
NLDVIKKENYYEVNSKCYEEAKKLKKISNQAEFIASFYKNDLIKINGELYRVIGVNNDLLNRI
EVNMIDITYREYLENMNDKRPPHIIKTIASKTQSIKKYSTDILGNLYEVKSKKHPQIIKKGGS
PKKKRKVSSDYKDHDGDYKDHDIDYKDDDDKSGGSGGSGGSTNLSDIIEKETGKQLVIQESIL
MLPEEVEEVIGNKPESDILVHTAYDESTDENVMLLTSDAPEYKPWALVIQDSNGENKIKMLSG
GSGGSGGSTNLSDIIEKETGKQLVIQESILMLPEEVEEVIGNKPESDILVHTAYDESTDENVM
LLTSDAPEYKPWALVIQDSNGENKIKMLSGGSKRTADGSEFESPKKKRKV (SEQ ID NO: 443)

| | | Base | | | Editing |
|---|---|---|---|---|---|
| Plasmid Name | mRNA entity | Editor | Deaminase | PAM | window |
| pRW-002 | 4014 | CBE | ppAPOBEC1 | NRCH | 3-9 |

MTSEKGPSTGDPTLRRRIESWEFDVFYDPRELRKETCLLYEIKWGMSRKIWRSSGKNTTNHVE
VNFIKKFTSERRFHSSISCSITWFLSWSPCWECSQAIREFLSQHPGVTLVIYVARLFWHMDQR
NRQGLRDLVNSGVTIQIMRASEYYHCWRNFVNYPPGDEAHWPQYPPLWMMLYALELHCIILSL
PPCLKISRRWQNHLAFFRLHLQNCHYQTIPPHILLATGLIHPSVTWRSGGSSGGSSGSETPGT
SESATPESSGGSSGGSDKKYSIGLAIGTNSVGWAVITDEYKVPSKKFKVLGNTDRHSIKKNLI
GALLFDSGETAEATRLKRTARRRYTRRKNRICYLQEIFSNEMAKVDDSFFHRLEESFLVEEDK
KHERHPIFGNIVDEVAYHEKYPTIYHLRKKLVDSTDKADLRLIYLALAHMIKFRGHFLIEGDL
NPDNSDVDKLFIQLVQTYNQLFEENPINASGVDAKAILSARLSKSRRLENLIAQLPGEKKNGL
FGNLIALSLGLTPNFKSNFDLAEDAKLQLSKDTYDDDLDNLLAQIGDQYADLFLAAKNLSDAI
LLSDILRVNTEITKAPLSASMVKRYDEHHQDLTLLKALVRQQLPEKYKEIFFDQSKNGYAGYI
DGGASQEEFYKFIKPILEKMDGTEELLVKLNREDLLRKQRTFDNGIIPHQIHLGELHAILRRQ
GDFYPFLKDNREKIEKILTFRIPYYVGPLARGNSRFAWMTRKSEETITPWNFEEVVDKGASAQ
SFIERMTNFDKNLPNEKVLPKHSLLYEYFTVYNELTKVKYVTEGMRKPAFLSGEQKKAIVDLL
FKTNRKVTVKQLKEDYFKKIECFDSVEISGVEDRFNASLGTYHDLLKIIKDKDFLDNEENEDI
LEDIVLTLTLFEDREMIEERLKTYAHLFDDKVMKQLKRLRYTGWGRLSRKLINGIRDKQSGKT
ILDFLKSDGFANRNFMQLIHDDSLTFKEDIQKAQVSGQGDSLHEHIANLAGSPAIKKGILQTV
KVVDELVKVMGGHKPENIVIEMARENQTTQKGQKNSRERMKRIEEGIKELGSQILKEHPVENT
QLQNEKLYLYYLQNGRDMYVDQELDINRLSDYDVDHIVPQSFLKDDSIDNKVLTRSDKNRGKS
DNVPSEEVVKKMKNYWRQLLNAKLITQRKFDNLTKAERGGLSELDKAGFIKRQLVETRQITKH
VAQILDSRMNTKYDENDKLIREVKVITLKSKLVSDFRKDFQFYKVREINNYHHAHDAYLNAVV
GTALIKKYPKLESEFVYGDYKVYDVRKMIAKSEQEIGKATAKYFFYSNIMNFFKTEITLANGE
IRKRPLIETNGETGEIVWDKGRDFATVRKVLSMPQVNIVKKTEVQTGGFSKESILPKGNSDKL
IARKKDWDPKKYGGFNSPTVAYSVLVVAKVEKGKSKKLKSVKELLGITIMERSSFEKNPIDFL
EAKGYKEVKKDLIIKLPKYSLFELENGRKRMLASAGVLQKGNELALPSKYVNFLYLASHYEKL
KGSPEDNEQKQLFVEQHKHYLDEIIEQISEFSKRVILADANLDKVLSAYNKHRDKPIREQAEN
IIHLFTLTNLGAPAAFKYFDTTINRKQYNTTKEVLDATLIRQSITGLYETRIDLSQLGGDSGG
SGGSGGSTNLSDIIEKETGKQLVIQESILMLPEEVEEVIGNKPESDILVHTAYDESTDENVML
LTSDAPEYKPWALVIQDSNGENKIKMLSGGSGGSGGSTNLSDIIEKETGKQLVIQESILMLPE
EVEEVIGNKPESDILVHTAYDESTDENVMLLTSDAPEYKPWALVIQDSNGENKIKMLSGGSKR
TADGSEFESPKKKRKV (SEQ ID NO: 444)

### Nucleobase Editors

[0155] Useful in the methods and compositions described herein are nucleobase editors that edit, modify or alter a target nucleotide sequence of a polynucleotide. Nucleobase editors described herein typically include a polynucleotide programmable nucleotide binding domain and a nucleobase editing domain (e.g., adenosine deaminase, cytidine deaminase, or a dual deaminase). A polynucleotide programmable nucleotide binding domain, when in conjunction with a bound guide polynucleotide (e.g., gRNA), can specifically bind to a target polynucleotide sequence and thereby localize the base editor to the target nucleic acid sequence desired to be edited.

### Polynucleotide Programmable Nucleotide Binding Domain

[0156] Polynucleotide programmable nucleotide binding domains bind polynucleotides (e.g., RNA, DNA). A polynucleotide programmable nucleotide binding domain of a base editor can itself comprise one or more domains (e.g., one or more nuclease domains). In some embodiments, the nuclease domain of a polynucleotide programmable nucleotide binding domain comprises an endonuclease or an exonuclease.

[0157] Disclosed herein are base editors comprising a polynucleotide programmable nucleotide binding domain comprising all or a portion (e.g., a functional portion) of a CRISPR protein (i.e., a base editor comprising as a domain all or a portion (e.g., a functional portion) of a CRISPR protein (e.g., a Cas protein), also referred to as a “CRISPR protein-derived domain” of the base editor). A CRISPR protein-derived domain incorporated into a base editor can be modified compared to a wild-type or natural version of the CRISPR protein. A CRISPR protein-derived domain can comprise one or more mutations, insertions, deletions, rearrangements and/or recombinations relative to a wild-type or natural version of the CRISPR protein.

[0158] Cas proteins that can be used herein include class 1 and class 2. Non-limiting examples of Cas proteins include Cas1, Cas1B, Cas2, Cas3, Cas4, Cas5, Cas5d, Cas5t, Cas5h, Cas5a, Cas6, Cas7, Cas8, Cas9 (also known as Csn1 or Csx12), Cas10, Csy1, Csy2, Csy3, Csy4, Cse1, Cse2, Cse3, Cse4, Cse5e, Csc1, Csc2, Csa5, Csn1, Csn2, Csm1, Csm2, Csm3, Csm4, Csm5, Csm6, Cmr1, Cmr3, Cmr4, Cmr5, Cmr6, Csb1, Csb2, Csb3, Csx17, Csx14, Csx10, Csx16, CsaX, Csx3, Csx1, Csx1S, Csf1, Csf2, CsO, Csf4, Csd1, Csd2, Cst1, Cst2, Csh1, Csh2, Csa1, Csa2, Csa3, Csa4, Csa5, Cas12a/Cpf1, Cas12b/C2cl (e.g., SEQ ID NO: 232), Cas12c/C2c3, Cas12d/CasY, Cas12e/CasX, Cas12g, Cas12h, Cas12i, and Cas12j/Cas(D, CARF, DinG, Turbo Cas9 (i.e., an SpCas9 with the amino acid alterations Q844R, V842L, F846Y, L847M, and 1852F), homologues thereof, or modified versions thereof A CRISPR enzyme can direct cleavage of one or both strands at a target sequence, such as within a target sequence and/or within a complement of a target sequence. For example, a CRISPR enzyme can direct cleavage of one or both strands within about 1, 2, 3, 4, 5, 6, 7, 8, 9, 10, 15, 20, 25, 50, 100, 200, 500, or more base pairs from the first or last nucleotide of a target sequence.

[0159] A vector that encodes a CRISPR enzyme that is mutated to with respect to a corresponding wild-type enzyme such that the mutated CRISPR enzyme lacks the ability to cleave one or both strands of a target polynucleotide containing a target sequence can be used. A Cas protein (e.g., Cas9, Cas12) or a Cas domain (e.g., Cas9, Cas12) can refer to a polypeptide or domain with at least or at least about 50%, 60%, 70%, 80%, 90%, 91%, 92%, 93%, 94%, 95%, 96%, 97%, 98%, 99%, or 100% sequence identity and/or sequence homology to a wild-type exemplary Cas polypeptide or Cas domain. Cas (e.g., Cas9, Cas12) can refer to the wild-type or a modified form of the Cas protein that can comprise an amino acid change such as a deletion, insertion, substitution, variant, mutation, fusion, chimera, or any combination thereof.

[0160] In some embodiments, a CRISPR protein-derived domain of a base editor can include all or a portion (e.g., a functional portion) of Cas9 from Corynebacterium ulcerans (NCBI Refs: NC_015683.1, NC_017317.1); Corynebacterium diphtheria (NCBI Refs: NC_016782.1, NC_016786.1); Spiroplasma syrphidicola (NCBI Ref NC_021284.1); Prevotella intermedia (NCBI Ref: NC_017861.1); Spiroplasma taiwanense (NCBI Ref: NC_021846.1); Streptococcus iniae (NCBI Ref: NC_021314.1); Belliella baltica (NCBI Ref NC_018010.1); Psychroflexus torquis (NCBI Ref NC_018721.1); Streptococcus thermophilus (NCBI Ref: YP_820832.1); Listeria innocua (NCBI Ref: NP_472073.1); Campylobacter jejuni (NCBI Ref YP_002344900.1); Neisseria meningitidis (NCBI Ref: YP_002342100.1), Streptococcus pyogenes, or Staphylococcus aureus.

[0161] Some aspects of the disclosure provide high fidelity Cas9 domains. High fidelity Cas9 domains are known in the art and described, for example, in Kleinstiver, B. P., et al. “High-fidelity CRISPR-Cas9 nucleases with no detectable genome-wide off-target effects.” Nature 529, 490-495 (2016); and Slaymaker, I. M., et al. “Rationally engineered Cas9 nucleases with improved specificity.” Science 351, 84-88 (2015); the entire contents of each of which are incorporated herein by reference. An Exemplary high fidelity Cas9 domain is provided in the Sequence Listing as SEQ ID NO: 233.

[0162] In some embodiments, any of the Cas9 fusion proteins or complexes provided herein comprise one or more of a D10A, N497X, a R661X, a Q695X, and/or a Q926X mutation, or a corresponding mutation in any of the amino acid sequences provided herein, wherein X is any amino acid..

[0163] Typically, Cas9 proteins, such as Cas9 from S. pyogenes (spCas9), require a “protospacer adjacent motif (PAM)” or PAM-like motif, which is a 2-6 base pair DNA sequence immediately following the DNA sequence targeted by the Cas9 nuclease in the CRISPR bacterial adaptive immune system. The presence of an NGG PAM sequence is required to bind a particular nucleic acid region, where the “N” in “NGG” is adenosine (A), thymidine (T), or cytosine (C), and the G is guanosine. In some embodiments, any of the fusion proteins or complexes provided herein may contain a Cas9 domain that is capable of binding a nucleotide sequence that does not contain a canonical (e.g., NGG) PAM sequence. Cas9 domains that bind to non-canonical PAM sequences have been described in the art and would be apparent to the skilled artisan. For example, Cas9 domains that bind non-canonical PAM sequences have been described in Kleinstiver, B. P., et al., “Engineered CRISPR-Cas9 nucleases with altered PAM specificities” Nature 523, 481-485 (2015); and Kleinstiver, B. P., et al., “Broadening the targeting range of Staphylococcus aureus CRISPR-Cas9 by modifying PAM recognition “Nature Biotechnology 33, 1293-1298 (2015); the entire contents of each are hereby incorporated by reference.

[0164] In some embodiments, the napDNAbp is a circular permutant (e.g., SEQ ID NO: 238).

[0165] In some embodiments, the polynucleotide programmable nucleotide binding domain comprises a nickase domain. Herein the term “nickase” refers to a polynucleotide programmable nucleotide binding domain comprising a nuclease domain that is capable of cleaving only one strand of the two strands in a duplexed nucleic acid molecule (e.g., DNA). For example, where a polynucleotide programmable nucleotide binding domain comprises a nickase domain derived from Cas9, the Cas9-derived nickase domain can include a D10A mutation and a histidine at position 840. In another example, a Cas9-derived nickase domain comprises an H₈₄₀A mutation, while the amino acid residue at position 10 remains a D.

[0166] In some embodiments, a Cas9 nuclease has an inactive (e.g., an inactivated) DNA cleavage domain, that is, the Cas9 is a nickase, referred to as an “nCas9” protein (for “nickase” Cas9; SEQ ID NO: 201). The Cas9 nickase may be a Cas9 protein that is capable of cleaving only one strand of a duplexed nucleic acid molecule (e.g., a duplexed DNA molecule). In some embodiments the Cas9 nickase comprises an amino acid sequence that is at least 60%, at least 65%, at least 70%, at least 75%, at least 80%, at least 85%, at least 90%, at least 95%, at least 96%, at least 97%, at least 98%, at least 99%, or at least 99.5% identical to any one of the Cas9 nickases provided herein. Additional suitable Cas9 nickases will be apparent to those of skill in the art based on this disclosure and knowledge in the field and are within the scope of this disclosure.

[0167] Also provided herein are base editors comprising a polynucleotide programmable nucleotide binding domain which is catalytically dead (i.e., incapable of cleaving a target polynucleotide sequence). For example, in the case of a base editor comprising a Cas9 domain, the Cas9 can comprise both a D10A mutation and an H₈₄₀A mutation. In further embodiments, a catalytically dead polynucleotide programmable nucleotide binding domain comprises a point mutation (e.g., D10A or H₈₄₀A) as well as a deletion of all or a portion (e.g., a functional portion) of a nuclease domain. dCas9 domains are known in the art and described, for example, in Qi et al., “Repurposing CRISPR as an RNA-guided platform for sequence-specific control of gene expression.” Cell. 2013; 152(5):1173-83, the entire contents of which are incorporated herein by reference.

[0168] The term “protospacer adjacent motif (PAM)” or PAM-like motif refers to a 2-6 base pair DNA sequence immediately following the DNA sequence targeted by a nucleic acid programmable DNA binding protein. In some embodiments, the PAM can be a 5′ PAM (i.e., located upstream of the 5′ end of the protospacer). In other embodiments, the PAM can be a 3′ PAM (i.e., located downstream of the 5′ end of the protospacer). The PAM sequence can be any PAM sequence known in the art. Suitable PAM sequences include, but are not limited to, NGG, NGA, NGC, NGN, NGT, NGTT, NGCG, NGAG, NGAN, NGNG, NGCN, NGCG, NGTN, NNGRRT, NNNRRT, NNGRR(N), TTTV, TYCV, TYCV, TATV, NNNNGATT, NNAGAAW, or NAAAAC. Y is a pyrimidine; N is any nucleotide base; W is A or T.

[0169] A base editor provided herein can comprise a CRISPR protein-derived domain that is capable of binding a nucleotide sequence that contains a canonical or non-canonical protospacer adjacent motif (PAM) sequence.

[0170] In some embodiments, the PAM is an “NRN” PAM where the “N” in “NRN” is adenine (A), thymine (T), guanine (G), or cytosine (C), and the R is adenine (A) or guanine (G); or the PAM is an “NYN” PAM, wherein the “N” in NYN is adenine (A), thymine (T), guanine (G), or cytosine (C), and the Y is cytidine (C) or thymine (T), for example, as described in R.T. Walton et al., 2020, Science, 10.1126/science.aba8853 (2020), the entire contents of which are incorporated herein by reference.

[0171] Several PAM variants are described in Table 3 below.

TABLE 3
Cas9 proteins and corresponding PAM sequences.
N is A, C, T, or G; and V is A, C, or G.

| Variant | PAM |
|---|---|
| spCas9 | NGG |
| spCas9-VRQR | NGA |
| spCas9-VRER | NGCG |
| xCas9 (sp) | NGN |
| saCas9 | NNGRRT |
| saCas9-KKH | NNNRRT |
| spCas9-LRKIQK | NGTN |
| spCas9-LRVSQK | NGTN |
| spCas9-LRVSQL | NGTN |
| Cpf1 | 5′ (TTTV) |
| SpyMac | 5′-NAA-3′ |

[0172] In some embodiments, the PAM is NGC. In some embodiments, the NGC PAM is recognized by a Cas9 variant. In some embodiments, the Cas9 variant contains one or more amino acid substitutions selected from D1135V, G1218R, R1335Q, and T1337R (collectively termed VRQR) of spCas9 (SEQ ID No: 197), or a corresponding mutation in another Cas9. In some embodiments, the Cas9 variant contains one or more amino acid substitutions selected from D1 135V, G1218R, R1335E, and T1337R (collectively termed VRER) of spCas9 (SEQ ID No: 197), or a corresponding mutation in another Cas9. In some embodiments, the Cas9 variant contains one or more amino acid substitutions selected from E782K, N968K, and R1015H (collectively termed KHH) of saCas9 (SEQ ID NO: 218).

[0173] In some cases, a Cas9 variant has specificity for the PAM 5′-NGC-3′. In some embodiments, a Cas9 variant includes one or more amino acid substitutions selected from D1135M, S1136Q, G1218K, E1219F, A1322R, D1332A, R1335E, and T1337K of spCas9 (SEQ ID No: 197), or a corresponding mutation in another Cas9. In some embodiments, a Cas9 variant includes one or more amino acid substitutions selected from D1 135M, S1136Y, G1218K, E1219F, A1322R, D1332A, R1335E, and T1337K of spCas9 (SEQ ID No: 197), or a corresponding mutation in another Cas9. In some embodiments, the a Cas9 variant includes one or more amino acid substitutions selected from D1135L, S1136Y, G1218K, E1219F, A1322R, D1332A, R1335E, and T1337R of spCas9 (SEQ ID No: 197), or a corresponding mutation in another Cas9. In some embodiments, a Cas9 variant includes one or more amino acid substitutions selected from D1135M, S1136Y, G1218K, E1219F, A1322R, D1332A, R1335E, and T1337K of spCas9 (SEQ ID No: 197), or a corresponding mutation in another Cas9. In some embodiments, a Cas9 variant includes one or more amino acid substitutions selected from D1135L, S1136Y, G1218K, E1219F, A1283D, A1322R, D1332A, R1335E, and T1337K of spCas9 (SEQ ID No: 197), or a corresponding mutation in another Cas9. In some embodiments, a Cas9 variant includes one or more amino acid substitutions selected from D1 135L, SI 136Q, G1218K, E1219F, E1250K, A1283D, A1322R, D1332A, R1335E, and T1337K of spCas9 (SEQ ID No: 197), or a corresponding mutation in another Cas9. In some embodiments, a Cas9 variant includes one or more amino acid substitutions selected from D1 135M, 51136Y, G1218K, E1219F, E1250K, A1283D, A1322R, D1332A, R1335E, and T1337R of spCas9 (SEQ ID No: 197), or a corresponding mutation in another Cas9. In some embodiments, a Cas9 variant includes one or more amino acid substitutions selected from R765A, Q768A, D1 135L, S1136Y, G1218K, A1283D, E1219F, A1322R, D1332A, R1335E, and T1337K of spCas9 (SEQ ID No: 197), or a corresponding mutation in another Cas9. In some embodiments, any of the Cas9 proteins provided herein, including an SpCas9 comprises any one, two, three, four, five, six, seven, eight, nine, or ten of the following amino acid substitutions in a corresponding residue: R765A, Q768A, W1126R, R1359W, E1250K, A1239T, A1239V, A1283D, R1335D, D1135L, D1135M, D1135R, D1135W, S1136H, S1136Q, S1136Y, G1218D, G1218K, G1218R, G1218E, G1218L, E1219F, E1219K, E1219N, A1322A, A1322R, A1322K, D1332A, R1335V, T1337K, T1337T, D1332A, D1135V and T1337R.

[0174] In some embodiments, a CRISPR protein-derived domain of a base editor comprises all or a portion (e.g., a functional portion) of a Cas9 protein with a canonical PAM sequence (NGG). In other embodiments, a Cas9-derived domain of a base editor can employ a non-canonical PAM sequence. Such sequences have been described in the art and would be apparent to the skilled artisan. For example, Cas9 domains that bind non-canonical PAM sequences have been described in Kleinstiver, B. P., et al., “Engineered CRISPR-Cas9 nucleases with altered PAM specificities” Nature 523, 481-485 (2015); and Kleinstiver, B. P., et al., “Broadening the targeting range of Staphylococcus aureus CRISPR-Cas9 by modifying PAM recognition” Nature Biotechnology 33, 1293-1298 (2015); R. T. Walton et al. “Unconstrained genome targeting with near-PAMless engineered CRISPR-Cas9 variants” Science 10.1126/science.aba8853 (2020); Hu et al. “Evolved Cas9 variants with broad PAM compatibility and high DNA specificity,” Nature, 2018 Apr. 5, 556(7699), 57-63; Miller et al., “Continuous evolution of SpCas9 variants compatible with non-G PAMs” Nat. Biotechnol., 2020 April;38(4):471-481; the entire contents of each are hereby incorporated by reference.

Fusion Proteins or Complexes Comprising a NapDNAbp and a Cytidine Deaminase and/or Adenosine Deaminase

[0175] Some aspects of the disclosure provide fusion proteins or complexes comprising a Cas9 domain or other nucleic acid programmable DNA binding protein (e.g., Cas12) and one or more cytidine deaminase, adenosine deaminase, or cytidine adenosine deaminase domains. It should be appreciated that the Cas9 domain may be any of the Cas9 domains or Cas9 proteins (e.g., dCas9 or nCas9) provided herein. In some embodiments, any of the Cas9 domains or Cas9 proteins (e.g., dCas9 or nCas9) provided herein may be fused with any of the cytidine deaminases and/or adenosine deaminases provided herein. The domains of the base editors disclosed herein can be arranged in any order.

[0176] In some embodiments, the fusion proteins or complexes comprising a cytidine deaminase or adenosine deaminase and a napDNAbp (e.g., Cas9 or Cas12 domain) do not include a linker sequence. In some embodiments, a linker is present between the cytidine or adenosine deaminase and the napDNAbp. In some embodiments, cytidine or adenosine deaminase and the napDNAbp are fused via any of the linkers provided herein. For example, in some embodiments the cytidine or adenosine deaminase and the napDNAbp are fused via any of the linkers provided herein.

[0177] It should be appreciated that the fusion proteins or complexes of the present disclosure may comprise one or more additional features. For example, in some embodiments, the fusion protein or complex may comprise inhibitors, cytoplasmic localization sequences, export sequences, such as nuclear export sequences, or other localization sequences, as well as sequence tags that are useful for solubilization, purification, or detection of the fusion proteins or complexes. Suitable protein tags provided herein include, but are not limited to, biotin carboxylase carrier protein (BCCP) tags, myc-tags, calmodulin-tags, FLAG-tags, hemagglutinin (HA)-tags, polyhistidine tags, also referred to as histidine tags or His-tags, maltose binding protein (MBP)-tags, nus-tags, glutathione-S-transferase (GST)-tags, green fluorescent protein (GFP)-tags, thioredoxin-tags, S-tags, Softags (e.g., Softag 1, Softag 3), strep-tags, biotin ligase tags, FlAsH tags, V5 tags, and SBP-tags. Additional suitable sequences will be apparent to those of skill in the art. In some embodiments, the fusion protein or complex comprises one or more His tags.

[0178] Exemplary, yet nonlimiting, fusion proteins are described in International PCT Application Nos. PCT/US2017/045381, PCT/US2019/044935, and PCT/US2020/016288, each of which is incorporated herein by reference for its entirety.

Fusion Proteins or Complexes with Internal Insertions

[0179] Provided herein are fusion proteins or complexes comprising a heterologous polypeptide fused to a nucleic acid programmable nucleic acid binding protein, for example, a napDNAbp. The heterologous polypeptide can be fused to the napDNAbp at a C-terminal end of the napDNAbp, an N-terminal end of the napDNAbp, or inserted at an internal location of the napDNAbp. In some embodiments, the heterologous polypeptide is a deaminase (e.g., cytidine or adenosine deaminase) or a functional fragment thereof For example, a fusion protein can comprise a deaminase flanked by an N-terminal fragment and a C-terminal fragment of a Cas9 or Cas12 (e.g., Cas12b/C₂c1), polypeptide.

[0180] The deaminase can be a circular permutant deaminase. In some embodiments, the deaminase is a circular permutant TadA, circularly permutated at amino acid residue 116, 136, or 65 as numbered in a TadA reference sequence.

[0181] The fusion protein or complexes can comprise more than one deaminase. The fusion protein or complex can comprise, for example, 1, 2, 3, 4, 5 or more deaminases. The deaminases in a fusion protein or complex can be adenosine deaminases, cytidine deaminases, or a combination thereof.

[0182] In some embodiments, the napDNAbp in the fusion protein or complex contains a Cas9 polypeptide or a fragment thereof The Cas9 polypeptide can be a variant Cas9 polypeptide. The Cas9 polypeptide can be a circularly permuted Cas9 protein.

[0183] The heterologous polypeptide (e.g., deaminase) can be inserted in the napDNAbp (e.g., Cas9 or Cas12 (e.g., Cas12b/C₂c1)) at a suitable location, for example, such that the napDNAbp retains its ability to bind the target polynucleotide and a guide nucleic acid. A deaminase (e.g., adenosine deaminase, cytidine deaminase, or adenosine deaminase and cytidine deaminase (dual deaminase)) can be inserted into a napDNAbp without compromising function of the deaminase (e.g., base editing activity) or the napDNAbp (e.g., ability to bind to target nucleic acid and guide nucleic acid).

[0184] In some embodiments, the deaminase (e.g., adenosine deaminase, cytidine deaminase, or adenosine deaminase and cytidine deaminase) is inserted in regions of the Cas9 polypeptide comprising higher than average B-factors (e.g., higher B factors compared to the total protein or the protein domain comprising the disordered region). Cas9 polypeptide positions comprising a higher than average B-factor can include, for example, residues 768, 792, 1052, 1015, 1022, 1026, 1029, 1067, 1040, 1054, 1068, 1246, 1247, and 1248 as numbered in SEQ ID NO: 197. Cas9 polypeptide regions comprising a higher than average B-factor can include, for example, residues 792-872, 792-906, and 2-791 as numbered in SEQ ID NO: 197.

[0185] In some embodiments, a heterologous polypeptide (e.g., deaminase) is inserted in a flexible loop of a Cas9 polypeptide. The flexible loop portions can be selected from the group consisting of 530-537, 569-570, 686-691, 943-947, 1002-1025, 1052-1077, 1232-1247, or 1298-1300 as numbered in SEQ ID NO: 197, or a corresponding amino acid residue in another Cas9 polypeptide. The flexible loop portions can be selected from the group consisting of: 1-529, 538-568, 580-685, 692-942, 948-1001, 1026-1051, 1078-1231, or 1248-1297 as numbered in SEQ ID NO: 197, or a corresponding amino acid residue in another Cas9 polypeptide.

[0186] A heterologous polypeptide (e.g., adenine deaminase) can be inserted into a Cas9 polypeptide region corresponding to amino acid residues: 1017-1069, 1242-1247, 1052-1056, 1060-1077, 1002-1003, 943-947, 530-537, 568-579, 686-691, 1242-1247, 1298-1300, 1066-1077, 1052-1056, or 1060-1077 as numbered in SEQ ID NO: 197, or a corresponding amino acid residue in another Cas9 polypeptide.

[0187] A heterologous polypeptide (e.g., adenine deaminase) can be inserted in place of a deleted region of a Cas9 polypeptide. The deleted region can correspond to an N-terminal or C-terminal portion of the Cas9 polypeptide. Exemplary internal fusions base editors are provided in Table 4A below:

TABLE 4A
Insertion loci in Cas9 proteins

| BE ID | Modification | Other ID |
|---|---|---|
| IBE001 | Cas9 TadA ins 1015 | ISLAY01 |
| IBE002 | Cas9 TadA ins 1022 | ISLAY02 |
| IBE003 | Cas9 TadA ins 1029 | ISLAY03 |
| IBE004 | Cas9 TadA ins 1040 | ISLAY04 |
| IBE005 | Cas9 TadA ins 1068 | ISLAY05 |
| IBE006 | Cas9 TadA ins 1247 | ISLAY06 |
| IBE007 | Cas9 TadA ins 1054 | ISLAY07 |
| IBE008 | Cas9 TadA ins 1026 | ISLAY08 |
| IBE009 | Cas9 TadA ins 768 | ISLAY09 |
| IBE020 | delta HNH TadA 792 | ISLAY20 |
| IBE021 | N-term fusion single TadA helix truncated 165-end | ISLAY21 |
| IBE029 | TadA-Circular Permutant116 ins1067 | ISLAY29 |
| IBE031 | TadA- Circular Permutant 136 ins1248 | ISLAY31 |
| IBE032 | TadA- Circular Permutant 136ins 1052 | ISLAY32 |
| IBE035 | delta 792-872 TadA ins | ISLAY35 |
| IBE036 | delta 792-906 TadA ins | ISLAY36 |
| IBE043 | TadA-Circular Permutant 65 ins1246 | ISLAY43 |
| IBE044 | TadA ins C-term truncate2 791 | ISLAY44 |

[0188] A heterologous polypeptide (e.g., deaminase) can be inserted within a structural or functional domain of a Cas9 polypeptide. A heterologous polypeptide (e.g., deaminase) can be inserted between two structural or functional domains of a Cas9 polypeptide. A heterologous polypeptide (e.g., deaminase) can be inserted in place of a structural or functional domain of a Cas9 polypeptide, for example, after deleting the domain from the Cas9 polypeptide. The structural or functional domains of a Cas9 polypeptide can include, for example, RuvC I, RuvC II, RuvC III, Rec1, Rec2, PI, or HNH.

[0189] A fusion protein can comprise a linker between the deaminase and the napDNAbp polypeptide. The linker can be a peptide or a non-peptide linker. For example, the linker can be an XTEN, (GGGS)ₙ (SEQ ID NO: 246), SGGSSGGS (SEQ ID NO: 330), (GGGGS)ₙ (SEQ ID NO: 247), (G)ₙ, (EAAAK)ₙ (SEQ ID NO: 248), (GGS)ₙ, SGSETPGTSESATPES (SEQ ID NO: 249). In some embodiments, the fusion protein comprises a linker between the N-terminal Cas9 fragment and the deaminase. In some embodiments, the fusion protein comprises a linker between the C-terminal Cas9 fragment and the deaminase. In some embodiments, the N-terminal and C-terminal fragments of napDNAbp are connected to the deaminase with a linker. In some embodiments, the N-terminal and C-terminal fragments are joined to the deaminase domain without a linker. In some embodiments, the fusion protein comprises a linker between the N-terminal Cas9 fragment and the deaminase but does not comprise a linker between the C-terminal Cas9 fragment and the deaminase. In some embodiments, the fusion protein comprises a linker between the C-terminal Cas9 fragment and the deaminase but does not comprise a linker between the N-terminal Cas9 fragment and the deaminase.

[0190] In some embodiments, the napDNAbp in the fusion protein or complex is a Cas12 polypeptide, e.g., Cas12b/C2cl, or a functional fragment thereof capable of associating with a nucleic acid (e.g., a gRNA) that guides the Cas12 to a specific nucleic acid sequence. The Cas12 polypeptide can be a variant Cas12 polypeptide. In other embodiments, the N- or C-terminal fragments of the Cas12 polypeptide comprise a nucleic acid programmable DNA binding domain or a RuvC domain. In other embodiments, the fusion protein contains a linker between the Cas12 polypeptide and the catalytic domain. In other embodiments, the amino acid sequence of the linker is GGSGGS (SEQ ID NO: 250) or GSSGSETPGTSESATPESSG (SEQ ID NO: 251). In other embodiments, the linker is a rigid linker. In other embodiments of the above aspects, the linker is encoded by GGAGGCTCTGGAGGAAGC (SEQ ID NO: 252) or 5 GGCTCTTCTGGATCTGAAACACCTGGCACAAGCGAGAGCGCCACCCCTGAGAGCTCTGGC (SEQ ID NO: 253).

[0191] In other embodiments, the fusion protein or complex contains a nuclear localization signal (e.g., a bipartite nuclear localization signal). In other embodiments, the amino acid sequence of the nuclear localization signal is MAPKKKRKVGIHGVPAA (SEQ ID NO: 261). In other embodiments of the above aspects, the nuclear localization signal is encoded by the following sequence: ATGGCCCCAAAGAAGAAGCGGAAGGTCGGTATCCACGGAGTCCCAGCAGCC (SEQ ID NO: 262). In other embodiments, the Cas12b polypeptide contains a mutation that silences the catalytic activity of a RuvC domain. In other embodiments, the Cas12b polypeptide contains D574A, D829A and/or D952A mutations.

[0192] In some embodiments, the fusion protein or complex comprises a napDNAbp domain (e.g., Cas12-derived domain) with an internally fused nucleobase editing domain (e.g., all or a portion (e.g., a functional portion) of a deaminase domain, e.g., an adenosine deaminase domain). In some embodiments, the napDNAbp is a Cas12b. In some embodiments, the base editor comprises a BhCas12b domain with an internally fused TadA*8 domain inserted at the loci provided in Table 4B below.

TABLE 4B
Insertion loci in Cas12b proteins

| | Insertion site | Inserted between aa |
|---|---|---|
| BhCas12b | | |
| position 1 | 153 | PS |
| position 2 | 255 | KE |
| position 3 | 306 | DE |
| position 4 | 980 | DG |
| position 5 | 1019 | KL |
| position 6 | 534 | FP |
| position 7 | 604 | KG |
| position 8 | 344 | HF |
| BvCas12b | | |
| position 1 | 147 | PD |
| position 2 | 248 | GG |
| position 3 | 299 | PE |
| position 4 | 991 | GE |
| position 5 | 1031 | KM |
| AaCas12b | | |
| position 1 | 157 | PG |
| position 2 | 258 | VG |
| position 3 | 310 | DP |
| position 4 | 1008 | GE |
| position 5 | 1044 | GK |

[0193] In some embodiments, the base editing system described herein is an ABE with TadA inserted into a Cas9. Polypeptide sequences of relevant ABEs with TadA inserted into a Cas9 are provided in the attached Sequence Listing as SEQ ID NOs: 263-308.

[0194] Exemplary, yet nonlimiting, fusion proteins are described in International PCT Application Nos. PCT/US2020/016285 and U.S. Provisional Application Nos. 62/852,228 and 62/852,224, the contents of which are incorporated by reference herein in their entireties.

### A to G Editing

[0195] In some embodiments, a base editor described herein comprises an adenosine deaminase domain. Such an adenosine deaminase domain of a base editor can facilitate the editing of an adenine (A) nucleobase to a guanine (G) nucleobase by deaminating the A to form inosine (I), which exhibits base pairing properties of G. In some embodiments, an A-to-G base editor further comprises an inhibitor of inosine base excision repair, for example, a uracil glycosylase inhibitor (UGI) domain or a catalytically inactive inosine specific nuclease. Without wishing to be bound by any particular theory, the UGI domain or catalytically inactive inosine specific nuclease can inhibit or prevent base excision repair of a deaminated adenosine residue (e.g., inosine), which can improve the activity or efficiency of the base editor.

[0196] A base editor comprising an adenosine deaminase can act on any polynucleotide, including DNA, RNA and DNA-RNA hybrids. In an embodiment an adenosine deaminase domain of a base editor comprises all or a portion (e.g., a functional portion) of an ADAT comprising one or more mutations which permit the ADAT to deaminate a target A in DNA. For example, the base editor can comprise all or a portion (e.g., a functional portion) of an ADAT from Escherichia coli (EcTadA) comprising one or more of the following mutations: D108N, A106V, D147Y, E155V, L84F, H123Y, 1156F, or a corresponding mutation in another adenosine deaminase. Exemplary ADAT homolog polypeptide sequences are provided in the Sequence Listing as SEQ ID NOs: 1 and 309-315.

[0197] The adenosine deaminase can be derived from any suitable organism (e.g., E. coli). In some embodiments, the adenosine deaminase is from Escherichia coli, Staphylococcus aureus, Salmonella typhi, Shewanella putrefaciens, Haemophilus influenzae, Caulobacter crescentus, or Bacillus subtilis. In some embodiments, the adenine deaminase is a naturally-occurring adenosine deaminase that includes one or more mutations corresponding to any of the mutations provided herein (e.g., mutations in ecTadA). The corresponding residue in any homologous protein can be identified by e.g., sequence alignment and determination of homologous residues.

[0198] The mutations in any naturally-occurring adenosine deaminase (e.g., having homology to ecTadA) that correspond to any of the mutations described herein (e.g., any of the mutations identified in ecTadA) can be generated accordingly.

[0199] In some embodiments, the adenosine deaminase comprises an amino acid sequence that is at least 60%, at least 65%, at least 70%, at least 75%, at least 80%, at least 85%, at least 90%, at least 95%, at least 96%, at least 97%, at least 98%, at least 99%, or at least 99.5% identical to any one of the amino acid sequences set forth in any of the adenosine deaminases provided herein. It should be appreciated that adenosine deaminases provided herein may include one or more mutations (e.g., any of the mutations provided herein). The disclosure provides any deaminase domains with a certain percent identify plus any of the mutations or combinations thereof described herein. In some embodiments, the adenosine deaminase comprises an amino acid sequence that has 1, 2, 3, 4, 5, 6, 7, 8, 9, 10, 11, 12, 13, 14, 15, 16, 17, 18, 19, 20, 21, 22, 21, 24, 25, 26, 27, 28, 29, 30, 31, 32, 33, 34, 35, 36, 37, 38, 39, 40, 41, 42, 43, 44, 45, 46, 47, 48, 49, 50, or more mutations compared to a reference sequence, or any of the adenosine deaminases provided herein.

[0200] It should be appreciated that any of the mutations provided herein (e.g., based on a TadA reference sequence, such as TadA*7.10 (SEQ ID NO: 1)) can be introduced into other adenosine deaminases, such as E. coli TadA (ecTadA), S. aureus TadA (saTadA), or other adenosine deaminases (e.g., bacterial adenosine deaminases). In some embodiments, the TadA reference sequence is TadA*7.10 (SEQ ID NO: 1). It would be apparent to the skilled artisan that additional deaminases may similarly be aligned to identify homologous amino acid residues that can be mutated as provided herein. Thus, any of the mutations identified in a TadA reference sequence can be made in other adenosine deaminases (e.g., ecTada) that have homologous amino acid residues. It should also be appreciated that any of the mutations provided herein can be made individually or in any combination in a TadA reference sequence or another adenosine deaminase.

[0201] In some embodiments, the adenosine deaminase comprises an alteration or set of alterations selected from those listed in Tables 5A-5E below:

TABLE 5A
Adenosine Deaminase Variants. Residue positions in the E. coli TadA variant
(TadA*) are indicated.

| | 23 | 26 | 36 | 37 | 48 | 49 | 51 | 72 | 84 | 87 | 106 | 108 | 123 | 125 | 142 | 146 | 147 | 152 | 155 | 156 | 157 | 161 |
|---|---|---|---|---|---|---|---|---|---|---|---|---|---|---|---|---|---|---|---|---|---|---|
| TadA*0.1 | W | R | H | Z | P | | R | N | L | S | A | D | H | G | A | S | D | R | E | I | K | K |
| TadA*0.2 | W | R | H | N | P | | R | N | L | S | A | D | H | G | A | S | D | R | E | I | K | K |
| TadA*1.1 | W | R | H | N | P | | R | N | L | S | A | N | H | G | A | S | D | R | E | I | K | K |
| TadA*1.2 | W | R | H | N | P | | R | N | L | S | V | N | H | G | A | S | D | R | E | I | K | K |
| TadA*2.1 | W | R | H | N | P | | R | N | L | S | V | N | H | G | A | S | Y | R | V | I | K | K |
| TadA*2.2 | W | R | H | N | P | | R | N | L | S | V | N | H | G | A | S | Y | R | V | I | K | K |
| TadA*2.3 | W | R | H | N | P | | R | N | L | S | V | N | H | G | A | S | Y | R | V | I | K | K |
| TadA*2.4 | W | R | H | N | P | | R | N | L | S | V | N | H | G | A | S | Y | R | V | I | K | K |
| TadA*2.5 | W | R | H | N | P | | R | N | L | S | V | N | H | G | A | S | Y | R | V | I | K | K |
| TadA*2.6 | W | R | H | N | P | | R | N | L | S | V | N | H | G | A | S | Y | R | V | I | K | K |
| TadA*2.7 | W | R | H | N | P | | R | N | L | S | V | N | H | G | A | S | Y | R | V | I | K | K |
| TadA*2.8 | W | R | H | N | P | | R | N | L | S | V | N | H | G | A | S | Y | R | V | I | K | K |
| TadA*2.9 | W | R | H | N | P | | R | N | L | S | V | N | H | G | A | S | Y | R | V | I | K | K |
| TadA*2.10 | W | R | H | N | P | | R | N | L | S | V | N | H | G | A | S | Y | R | V | I | K | K |
| TadA*2.11 | W | R | H | N | P | | R | N | L | S | V | N | H | G | A | S | Y | R | V | I | K | K |
| TadA*2.12 | W | R | H | N | P | | R | N | L | S | V | N | H | G | A | S | Y | R | V | I | K | K |
| TadA*3.1 | W | R | H | N | P | | R | N | F | S | V | N | Y | G | A | S | Y | R | V | F | K | K |
| TadA*3.2 | W | R | H | N | P | | R | N | F | S | V | N | Y | G | A | S | Y | R | V | F | K | K |
| TadA*3.3 | W | R | H | N | P | | R | N | F | S | V | N | Y | G | A | S | Y | R | V | F | K | K |
| TadA*3.4 | W | R | H | N | P | | R | N | F | S | V | N | Y | G | A | S | Y | R | V | F | K | K |
| TadA*3.5 | W | R | H | N | P | | R | N | F | S | V | N | Y | G | A | S | Y | R | V | F | K | K |
| TadA*3.6 | W | R | H | N | P | | R | N | F | S | V | N | Y | G | A | S | Y | R | V | F | K | K |
| TadA*3.7 | W | R | H | N | P | | R | N | F | S | V | N | Y | G | A | S | Y | R | V | F | K | K |
| TadA*3.8 | W | R | H | N | P | | R | N | F | S | V | N | Y | G | A | S | Y | R | V | F | K | K |
| TadA*4.1 | W | R | H | N | P | | R | N | L | S | V | N | H | G | N | S | Y | R | V | I | K | K |
| TadA*4.2 | W | G | H | N | P | | R | N | L | S | V | N | H | G | N | S | Y | R | V | I | K | K |
| TadA*4.3 | W | R | H | N | P | | R | N | F | S | V | N | Y | G | N | S | Y | R | V | F | K | K |
| TadA*5.1 | W | R | L | N | P | | L | N | F | S | V | N | Y | G | A | C | Y | R | V | F | N | K |
| TadA*5.2 | W | R | H | S | P | | R | N | F | S | V | N | Y | G | A | S | Y | R | V | F | K | T |
| TadA*5.3 | W | R | L | N | P | | L | N | I | S | V | N | Y | G | A | C | Y | R | V | F | N | K |
| TadA*5.4 | W | R | H | S | P | | R | N | F | S | V | N | Y | G | A | S | Y | R | V | F | K | T |
| TadA*5.5 | W | R | L | N | P | | L | N | F | S | V | N | Y | G | A | C | Y | R | V | F | N | K |
| TadA*5.6 | W | R | L | N | P | | L | N | F | S | V | N | Y | G | A | C | Y | R | V | F | N | K |
| TadA*5.7 | W | R | L | N | P | | L | N | F | S | V | N | Y | G | A | C | Y | R | V | F | N | K |
| TadA*5.8 | W | R | L | N | P | | L | N | F | S | V | N | Y | G | A | C | Y | R | V | F | N | K |
| TadA*5.9 | W | R | L | N | P | | L | N | F | S | V | N | Y | G | A | C | Y | R | V | F | N | K |
| TadA*5.10 | W | R | T | N | P | | L | N | F | S | V | N | Y | G | A | C | Y | R | V | F | N | K |
| TadA*5.11 | W | R | L | N | P | | L | N | F | S | V | N | Y | G | A | C | Y | R | V | F | N | K |
| TadA*5.12 | W | R | L | N | P | | L | N | F | S | V | N | Y | G | A | C | Y | R | V | F | N | K |
| TadA*5.13 | W | R | H | N | P | | L | D | F | S | V | N | Y | A | A | S | Y | R | V | F | K | K |
| TadA*5.14 | W | R | H | N | S | | L | N | F | C | V | N | Y | G | A | S | Y | R | V | F | K | K |
| TadA*6.1 | W | R | H | N | S | | L | N | F | S | V | N | Y | G | N | S | Y | R | V | F | K | K |
| TadA*6.2 | W | R | H | N | T | V | L | N | F | S | V | N | Y | G | N | S | Y | R | V | F | N | K |
| TadA*6.3 | W | R | L | N | S | | L | N | F | S | V | N | Y | G | A | C | Y | R | V | F | N | K |
| TadA*6.4 | W | R | L | N | S | | L | N | F | S | V | N | Y | G | N | C | Y | R | V | F | N | K |
| TadA*6.5 | W | R | L | N | T | V | L | N | F | S | V | N | Y | G | A | C | Y | R | V | F | N | K |
| TadA*6.6 | W | R | L | N | T | V | L | N | F | S | V | N | Y | G | N | C | Y | R | V | F | N | K |
| TadA*7.1 | W | R | L | N | A | | L | N | F | S | V | N | Y | G | A | C | Y | R | V | F | N | K |
| TadA*7.2 | W | R | L | N | A | | L | N | F | S | V | N | Y | G | N | C | Y | R | V | F | N | K |
| TadA*7.3 | L | R | L | N | A | | L | N | F | S | V | N | Y | G | A | C | Y | R | V | F | N | K |
| TadA*7.4 | R | R | L | N | A | | L | N | F | S | V | N | Y | G | A | C | Y | R | V | F | N | K |
| TadA*7.5 | W | R | L | N | A | | L | N | F | S | V | N | Y | G | A | C | Y | H | V | F | N | K |
| TadA*7.6 | W | R | L | N | A | | L | N | I | S | V | N | Y | G | A | C | Y | P | V | F | N | K |
| TadA*7.7 | L | R | L | N | A | | L | N | F | S | V | N | Y | G | A | C | Y | P | V | F | N | K |
| TadA*7.8 | L | R | L | N | A | | L | N | F | S | V | N | Y | G | N | C | Y | R | V | F | N | K |
| TadA*7.9 | L | R | L | N | A | | L | N | F | S | V | N | Y | G | N | C | Y | P | V | F | N | K |
| TadA*7.10 | R | R | L | N | A | | L | N | F | S | V | N | Y | G | A | C | Y | P | V | F | N | K |

TABLE 5B
TadA*8 Adenosine Deaminase Variants. Residue positions in the E. coli TadA
variant (TadA*) are indicated. Alterations are referenced to TadA*7.10 (first row).

| | 23 | 36 | 48 | 51 | 76 | 82 | 84 | 106 | 108 | 123 | 146 | 147 | 152 | 154 | 155 | 156 | 157 | 166 |
|---|---|---|---|---|---|---|---|---|---|---|---|---|---|---|---|---|---|---|
| TadA*7.10 | R | L | A | L | I | V | F | V | N | Y | C | Y | P | Q | V | F | N | T |
| TadA*8.1 | | | | | | | | | | | | T | | | | | | |
| TadA*8.2 | | | | | | | | | | | | R | | | | | | |
| TadA*8.3 | | | | | | | | | | | | | | S | | | | |
| TadA*8.4 | | | | | | | | | | H | | | | | | | | |
| TadA*8.5 | | | | | | S | | | | | | | | | | | | |
| TadA*8.6 | | | | | | | | | | | | | | | | | | R |
| TadA*8.7 | | | | | | | | | | | | | | R | | | | |
| TadA*8.8 | | | | | | | | | | H | | R | | R | | | | |
| TadA*8.9 | | | | | Y | | | | | | | R | | R | | | | |
| TadA*8.10 | | | | | | | | | | | | R | | R | | | | R |
| TadA*8.11 | | | | | | | | | | | | T | | R | | | | |
| TadA*8.12 | | | | | | | | | | | | T | | S | | | | |
| TadA*8.13 | | | | | Y | | | | | H | | R | | R | | | | |
| TadA*8.14 | | | | | Y | S | | | | | | | | | | | | |
| TadA*8.15 | | | | | | S | | | | | | R | | | | | | |
| TadA*8.16 | | | | | | S | | | | H | | R | | | | | | |
| TadA*8.17 | | | | | | S | | | | | | | | R | | | | |
| TadA*8.18 | | | | | | S | | | | H | | | | R | | | | |
| TadA*8.19 | | | | | | S | | | | H | | R | | R | | | | |
| TadA*8.20 | | | | | Y | S | | | | H | | R | | R | | | | |
| TadA*8.21 | | | | | | | | | | | | R | | S | | | | |
| TadA*8.22 | | | | | | S | | | | | | | | S | | | | |
| TadA*8.23 | | | | | | S | | | | H | | | | | | | | |
| TadA*8.24 | | | | | | S | | | | H | | T | | | | | | |

TABLE 5C
TadA*9 Adenosine Deaminase Variants. Alterations are referenced
to TadA*7.10. Additional details of TadA*9 adenosine
deaminases are described in International PCT Application
No. PCT/US2020/049975, which is incorporated herein by
reference in its entirety for all purposes.

| TadA*9 | |
|---|---|
| Description | Alterations |
| TadA*9.1 | E25F, V82S, Y123H, T133K, Y147R, Q154R |
| TadA*9.2 | E25F, V82S, Y123H, Y147R, Q154R |
| TadA*9.3 | V82S, Y123H, P124W, Y147R, Q154R |
| TadA*9.4 | L51W, V82S, Y123H, C146R, Y147R, Q154R |
| TadA*9.5 | P54C, V82S, Y123H, Y147R, Q154R |
| TadA*9.6 | Y73S, V82S, Y123H, Y147R, Q154R |
| TadA*9.7 | N38G, V82T, Y123H, Y147R, Q154R |
| TadA*9.8 | R23H, V82S, Y123H, Y147R, Q154R |
| TadA*9.9 | R21N, V82S, Y123H, Y147R, Q154R |
| TadA*9.10 | V82S, Y123H, Y147R, Q154R, A158K |
| TadA*9.11 | N72K, V82S, Y123H, D139L, Y147R, Q154R, |
| TadA*9.12 | E25F, V82S, Y123H, D139M, Y147R, Q154R |
| TadA*9.13 | M70V, V82S, M94V, Y123H, Y147R, Q154R |
| TadA*9.14 | Q71M, V82S, Y123H, Y147R, Q154R |
| TadA*9.15 | E25F, V82S, Y123H, T133K, Y147R, Q154R |
| TadA*9.16 | E25F, V82S, Y123H, Y147R, Q154R |
| TadA*9.17 | V82S, Y123H, P124W, Y147R, Q154R |
| TadA*9.18 | L51W, V82S, Y123H, C146R, Y147R, Q154R |
| TadA*9.19 | P54C, V82S, Y123H, Y147R, Q154R |
| TadA*9.2 | Y73S, V82S, Y123H, Y147R, Q154R |
| TadA*9.21 | N38G, V82T, Y123H, Y147R, Q154R |
| TadA*9.22 | R23H, V82S, Y123H, Y147R, Q154R |
| TadA*9.23 | R21N, V82S, Y123H, Y147R, Q154R |
| TadA*9.24 | V82S, Y123H, Y147R, Q154R, A158K |
| TadA*9.25 | N72K, V82S, Y123H, D139L, Y147R, Q154R, |
| TadA*9.26 | E25F, V82S, Y123H, D139M, Y147R, Q154R |
| TadA*9.27 | M70V, V82S, M94V, Y123H, Y147R, Q154R |
| TadA*9.28 | Q71M, V82S, Y123H, Y147R, Q154R |
| TadA*9.29 | E25F, I76Y, V82S, Y123H, Y147R, Q154R |
| TadA*9.30 | I76Y, V82T, Y123H, Y147R, Q154R |
| TadA*9.31 | N38G, I76Y, V82S, Y123H, Y147R, Q154R |
| TadA*9.32 | N38G, I76Y, V82T, Y123H, Y147R, Q154R |
| TadA*9.33 | R23H, I76Y, V82S, Y123H, Y147R, Q154R |
| TadA*9.34 | P54C, I76Y, V82S, Y123H, Y147R, Q154R |
| TadA*9.35 | R21N, I76Y, V82S, Y123H, Y147R, Q154R |
| TadA*9.36 | I76Y, V82S, Y123H, D138M, Y147R, Q154R |
| TadA*9.37 | Y72S, I76Y, V82S, Y123H, Y147R, Q154R |
| TadA*9.38 | E25F, I76Y, V82S, Y123H, Y147R, Q154R |
| TadA*9.39 | I76Y, V82T, Y123H, Y147R, Q154R |
| TadA*9.40 | N38G, I76Y, V82S, Y123H, Y147R, Q154R |
| TadA*9.41 | N38G, I76Y, V82T, Y123H, Y147R, Q154R |
| TadA*9.42 | R23H, I76Y, V82S, Y123H, Y147R, Q154R |
| TadA*9.43 | P54C, I76Y, V82S, Y123H, Y147R, Q154R |
| TadA*9.44 | R21N, I76Y, V82S, Y123H, Y147R, Q154R |
| TadA*9.45 | I76Y, V82S, Y123H, D138M, Y147R, Q154R |
| TadA*9.46 | Y72S, I76Y, V82S, Y123H, Y147R, Q154R |
| TadA*9.47 | N72K, V82S, Y123H, Y147R, Q154R |
| TadA*9.48 | Q71M, V82S, Y123H, Y147R, Q154R |
| TadA*9.49 | M70V, V82S, M94V, Y123H, Y147R, Q154R |
| TadA*9.50 | V82S, Y123H, T133K, Y147R, Q154R |
| TadA*9.51 | V82S, Y123H, T133K, Y147R, Q154R, A158K |
| TadA*9.52 | M70V, Q71M, N72K, V82S, Y123H, Y147R, Q154R |
| TadA*9.53 | N72K, V82S, Y123H, Y147R, Q154R |
| TadA*9.54 | Q71M, V82S, Y123H, Y147R, Q154R |
| TadA*9.55 | M70V, V82S, M94V, Y123H, Y147R, Q154R |
| TadA*9.56 | V82S, Y123H, T133K, Y147R, Q154R |
| TadA*9.57 | V82S, Y123H, T133K, Y147R, Q154R, A158K |
| TadA*9.58 | M70V, Q71M, N72K, V82S, Y123H, Y147R, Q154R |

[0202] In some embodiments, the adenosine deaminase comprises a TadA*8.20 adenosine deaminase variant further comprising an F149Y amino acid alteration. In some embodiments, the adenosine deaminase comprises a TadA*8.20 adenosine deaminase variant further comprising the amino acid alterations R147D, F149Y, T166I, and D167N (TadA*8.10+). In some embodiments, the adenosine deaminase comprises a TadA*8.20 adenosine deaminase variant further comprising the amino acid alterations S82T and F149Y (TadA*9v1). In some embodiments, the adenosine deaminase comprises a TadA*8.20 adenosine deaminase variant further comprising the amino acid alterations Y147D, F149Y, T1661, D167N and S82T (TadA*9v2).

[0203] In some embodiments, the adenosine deaminase comprises one or more of M1I, MIS, S2A, S2E, S2H, S2R, S2L, E3L, V4D, V4E, V4M, V4K, V4S, V4T, V4A, E5K, F6S, F6G, F6H, F6Y, F6I, F6E, S7K, H8E, H8Y, H8H, H8Q, H8E, H8G, H8S, E9Y, E9K, E9V, E9E, Y10F, Y10W, Y10Y, M12S, M12L, M12R, M12W, R13H, R13I, R13Y, R13R, R13G, R13S, H14N, A15D, A15V, A15L, A15H, T17T, T17A, T17W, T17L, T17F, T17R, T17S, L18A, L18E, L18N, L18L, L18S, A19N, A19H, A19K, A19A, A19D, A19G, A19M, R21N, K20K, K20A, K20R, K20E, K20G, K20C, K20Q R21A, R21R, R21N, R21Y, R21C G22P, A22W, A22R, W23D, R23H, W23G, W23Q, W23L, W23R, W23H W23D W23M, W23W, W23I, D24E, D24G, D24W, D24D, D24R, E25F, E25M, E25D, E25A, E25G, E25R, E25E, E25H E25V, E25S, E25Y, R26D, R26E, R26G, R26N, R26Q, R26C, R26L, R26K, R26W, R26C, R26P, R26R, R26A, R26H, E27E, E27Q, E27H, E27C, E27G, E27K, E27S, E27P, E27R, E27L, E27V, E27D, V28V, V28A, V28C, V28G, V28P, V28S, V28T, P29V, P29P, P29A, P29G, P29K, P29L, V30V, V30I, V30L, V30F, V30G, V30A, V30M, L34S, L34V, L34L, L34M, L34W, L34G, H36E, H36V, L36H, H36L, H36N, N37N, N37H, N37R, N37T, N37S, N38G, N38R, N38N, N38E, V401, W45A, W45W, W45R, W45L, W45N, N46N, N46M, N46P, N46G, N46L, N46R, N46V, R46W, R46F, R46Q, R46M, R47A, R47Q, R47F, R47K, R47P, R47W, R47M, R47R, R47G, R47S, R47V, R47H, P48T, P48L, P48A, P48I, P48S, P48R, P48K, P48D, P48E, P48H, P48G, P48P, P48N, I49G, I49H, I49V, I49F, I49H, 1491, 149M, I49N, I49K, I49Q, I49T, G50L, G50S, G50R, G50G, R51H, R51L, R51N, L51W, R51Y, R51G, R51V, R51R, H52D, H52Y, H52I, H52H, D53D, D53E, D53G, D53P, P54C, P54T, P54P, P54E, A55H, T55A, T55I, T55V, T55G, T55T, A56A, A56H, A56W, A56E, A56S, H57P, H57A, H57H, H57N, A58G, A58E, A58A, A58R, E59A, E59G, E59I, E59Q, E59W, E59E, E59T, E59H, E59P, M61A, M61I, M61L, M61V, M61P, M61G, M61I, L63S, L63V, L63T, L63R, L63H, L63A, R64A, R64Q, R64R, R64D, Q65V, Q65H, Q65G, Q65P, Q65F, Q65Q, Q65R, G66V, G66E, G66T, G66G, G66C, G67G, G67W, G67I, G67A, G67D, G67L, G67V, L68Q, L68M, L68V, L68H, L68L, L68G, V69A, V69M, V69V, M70V, M70L, E70A, M70A, M70M, M70E, M70T, M70v, Q71M, Q71N, Q71L, Q71R, Q71Q, Q71I, N72A, N72K, N72S, N72D, N72Y, N72N, N72H, N72G, N72M, Y73G, Y73I, Y73K, Y73R, Y73S, Y73Y, Y73H, Y73A, R74A, R74Q, R74G, R74K, R74L, R74N, R74G, R74K, R74R, I76H, I76R, I76W, I76Y, I76V, I76Q, I76L, I76D, I76F, 176I, I76N, I76T, I76Y, D77G, D77D, D77A, D77Q, A78Y, A78T, A78G, A78A, A78I, T79M, T79R, T79L, T79T, L80M, L80Y, L80I, L80V, L80L, Y81D, Y81V, Y81Y, Y81M, V82A, V82S, V82G, V82T, V82V, V82Q, V82Y, T83L, T83F, T83T, T83N, L84E, L84F, L84Y, L84I, L84L, L84M, L84A, L84T, L84S, E85K, E85G, E85P, E85S, E85E, E85F, E85V, E85R, P86T, P86C, P86P, P86L, P86N, P86K, P86H, C87M, C87I, C87S, C87N, C87P, S87C, S87L, S87V, V88A, V88M, V88V, V88T, V88E, V88D, V88S, C90S, C90P, C90A, C90T, C90M, A91A, A91G, A91S, A91V, A91T, A91C, A91L, G92T, G92M, G92A, G92Y, G92G, A93I, A93C, A93M, A93V, A93A, M94M, M94T, M94A, M94V, M94L, M94I, M94H, I95S, I95G, I95L, I95H, I95V, H96A, H96L, H96R, H96S, H96H, H96N, H96E, S97C, S97G, S97I, S97M, S97R, S97S, S97P, R98K, R98I, R98N, R98Q, R98G, R98H, R98C, R98L, R98R, G100R, G100V, G100K, G100A, G100S, G100M, G100I, R101V, R101R, R101S, R101C, V102A, V102F, V1021, V102V, D103A, V103A, V103G, V103F, V103V, F104G, D104N, F104V, F104I, F104L, F104A, F104F, F104R, G105V, G105W, G105G, G105M, G105A, A106T, V106Q, V106F, V106W, V106M, A106A, A106Q, A106F, A106G, A106W, A106M, A106V, A106R, A106L, A106S, A106B, A106I, R107C, R107G, R107P, R107K, R107A, R107N, R107W, R107H, R107S, R107R, R107F, D108N, D108F, D108G, D108V, D108A, D108Y, D108H, D108I, D108K, D108L, D108M, D108Q, N108Q, N108F, N108W, N108M, N108K, D108K, D108F, D108M, D108Q, D108R, D108W, D108S, D108E, D108T, D108R, D108D, A109H, A109K, A109R, A109S, A109T, A109V, A109A, A109D, K110G, K110H, K110I, K110R, K110T, K110K, K110A, K1101, T111A, T111G, T111H, T111R, T111T, T111K, G112A, G112G, G112H, G112T, G112R, A113N, A114G, A114H, A114V, A114C, A114S, A114A, G115S, G115G, G115M, G115L, G115A, G115F, L117M, L117L, L117W, L117A, L117S, L117N, L117V, M118D, M118G, M118K, M118N, M118V, M118M, M118L, M118R, D119L, D119N, D119S, D119V, D119D, V120H, V120L, V120V, V120T, V120A, V120E, V120G, V120D, L121D, L121M, L121N, L121K, L121L, H122H, H122N, H122P, H122R, H122S, H122Y, H122G, H122T, H122L, H123C, H123G, H123P, H123V, H123Y, Y123H, H123Y, H123H, P124P, P124H, P124A, P124Y, P124D, P124G, P1241, P124L, P124W, G125H, G1251, G125A, G125M, G125K, G125G, G125P, M126D, M126H, M126K, M1261, M126N, M1260, M126S, M126Y, M126M, M126G, N127H, N127S, N127D, N127K, N127R, N127N, N1271, N127P, N127M, H128R, H128N, H128L, H128H, R129H, R129Q, R129V, R129I, R129E, R129V, R129R, R129M, R129P, V130R, V130V, V130E, V130D, E131E, E131I, E131V, E131K, I132I, I132F, I132T, I132L, I132V, I132E, T133V, T133E, T133G, T133K, T133T, T133A, T133H, T133F, T133I, E134A, E134E, E134G, E134I, E134H, E134K, E134T, G135G, G135V, G135I, G135P, G135E, I136G, I136L, I136T, I136I, I137A, I137D, I137E, L137M, I137S, L137L, L137I, A138D, A138E, A138G, S138A, A138N, A138S, A138T, A138V, A138Y, A138A, A138M, A138L, D139E, D139I, D139C, D139L, D139M, D139D, D139G, D139H, D139A, E140A, E140C, E140L, E140R, E140K, E140E, E140D, C141S, C141A, C141C, C141V, C141E, A142N, A142D, A142G, A142A, A142L, A142S, A142T, A142N, A142S, A142V, A142E, A142C, A143D, A143E, A143G, A143D, A143G, A143E, A143L, A143W, A143M, A143S, A143Q, A143R, A143A, A143I, L144S, L144L, L144T, L144A, L145A, L145F, L145G, L145D, L145L, L145C, L145E, L145S, C146R, S146A, S146C, S146D, S146F, S146R, S146T, S146D, S146G, S146S, S146L, D147D, D147L, D147F, D147G, D147Y, Y147T, Y147R, Y147D, D147R, D147Y, D147A, D147T, D147H, D147F, D147U, D147V, D1471, D147C, F148L, F148F, F148R, F148Y, F148A, F148T, F149C, F149M, F149R, F149Y, F149N, F149F, F149A, F149T, F149V, R150R, R150M, R150D, R150F, M151F, M151P, M151R, M151V, M151M, M151E, R152C, R152F, R152H, R152P, R152R, R152P, R152Q, R152M, R1520, R153C, R153Q, R153R, R153V, R153E, R153A, R153P, Q154E, Q154H, Q154M, Q154R, Q154L, Q154S, Q154V, Q154Q, Q154F, Q154I, Q154A, Q154K, E155F, E155G, E155I, E155K, E155P, E155V, E155D, E155E, E155L, E155Q, I156V, I156A, I156I, I156L, I156F, I156D, I156K, I156N, I156R, I156Y, E157A, E157F, E157I, E157P, E157T, E157V, N157K, K157N, K157V, K157P, K1571, K157F, K157F, K157T, K157A, K157S, K157R, A158Q, A158K, A158V, A158A, A158D, A158S, A158T, A158N, Q159S, Q159Q, Q159A, Q159F, Q159K, Q159L, Q159N, K160A, K160S, K160E, K160K, K160N, K160F, K160Q, K161T, K161K, K161R, K161I, K161A, K161N, K161Q, K161S, K161T, A162D, A162Q, R162H, R162P, A162S, A162A, A162N, A162M, A162K, Q163G, Q163S, Q163Q, Q163A, Q163H, Q163N, Q163R, S164F, S164S, S164Q, S1641, S164R, S164Y, S165S, S165P, S165Q, S165A, S165D, S1651, S165T, S165Y, T166T, T166Q, T166E, T166S, T166D, T166K, T166I, T166N, T166P, T166R, D167S D167D, D167I, D167G, D167T, D167A and/or D167N mutation in a TadA reference sequence (e.g., TadA*7.10,ecTadA, or TadA8e), and any alternative mutation at the corresponding position, or one or more corresponding mutations in another adenosine deaminase. Additional mutations are described in U.S. Patent Application Publication No. 2022/0307003 A1 U.S. Pat. No. 11,155,803, and International Patent Application Publications No. WO 2023/288304 A2, PCT/CN2022/143408, WO 2018/027078 A1, WO 2021/158921 A1 and WO 2023/034959 A2, the disclosures of which are incorporated herein by reference in their entirety for all purposes.

[0204] In various embodiments, an adenosine deaminase of the disclosure lacks an N-terminal methionine.

[0205] In some embodiments, the disclosure provides TadA variants comprising an alteration at an amino acid selected from one or more of L36, 176, V82, Y147, Q154, and N157 comapred to TadA*7.10. In some embodiments, the disclosure provides TadA variants comprising one or more of the following alterations relative to TadA*7.10: L36H, I76Y, V82T, Y147T, Q154S, and N157K. In some embodiments, the disclosure provides TadA variants comprising the following alterations relative to TadA*7.10: L36H, I76Y, V82T, Y147T, Q154S, and N157K. In some embodiments, the disclosure provides TadA variants comprising the following alterations relative to TadA*7.10: F84Y, A109L, A109V, A109I, A109F, A109S, A109T, A109N, V155S, V155T, V155N, F156Y, F156W, F156R, F156N, and F156Q. In some embodiments, the disclosure provides TadA variants comprising the following alterations relative to TadA*7.10: E3N, E3K, E3G, F6A, H14D, L18A, W23I, W23R, P29T, P29Y, P29Q, V35Q, L36S, N38D, G42M, N46Y, P48A, G50A, H52L, A62V, L63R, L63F, Q65R, G67N, L68V, M70I, N72Y, T79H, Y81V, V82S, M94R, G100V, V102E, V102S, R107A, A114C, GI15E, M118L, D119L, H122T, P124H, P124K, P124Q, H128R, V130F, I132K, I132T, E140L, A142N, A142S, L144Q, L145R, L145N, Y147A, F149A, R152P, F156N, and K160E.

[0206] In some embodiments, the disclosure provides TadA variants comprising a V82T, Y147T, and/or a Q154S mutation. In some embodiments, the disclosure provides TadA variants comprising a V82T, Y147T, and/or a Q154S mutation. In some embodiments, the disclosure provides TadA*8.8 further comprising a V82T mutation. In some embodiments, the disclosure provides TadA*8.8 further comprising a V82T, a Y147T, and a Q154S mutation. In some embodiments, the disclosure provides TadA*8.17 further comprising a V82T mutation. In some embodiments, the disclosure provides TadA*8.17 further comprising a V82T, a Y147T, and a Q154S mutation. In some embodiments, the disclosure provides TadA*8.20 further comprising a V82T mutation. In some embodiments, the disclosure provides TadA*8.20 further comprising a V82T, aY147T, and a Q154S mutation.

[0207] In embodiments, a variant of TadA*7.10 comprises one or more alterations selected from any of those alterations provided herein.

[0208] In particular embodiments, an adenosine deaminase heterodimer comprises a TadA*8 domain and an adenosine deaminase domain selected from Staphylococcus aureus (S. aureus) TadA, Bacillus subtilis (B. subtilis) TadA, Salmonella typhimurium (S. typhimurium) TadA, Shewanella putrefaciens (S. putrefaciens) TadA, Haemophilus influenzae F3031 (H influenzae) TadA, Caulobacter crescentus (C. crescentus) TadA, Geobacter sulfurreducens (G. sulfurreducens) TadA, or TadA*7.10.

[0209] In some embodiments, the TadA*8 is a variant as shown in Table 5D. Table 5D shows certain amino acid position numbers in the TadA amino acid sequence and the amino acids present in those positions in the TadA-7.10 adenosine deaminase. Table 5D also shows amino acid changes in TadA variants relative to TadA-7.10 following phage-assisted non-continuous evolution (PANCE) and phage-assisted continuous evolution (PACE), as described in M. Richter et al., 2020, Nature Biotechnology, doi.org/10.1038/s41587-020-0453-z, the entire contents of which are incorporated by reference herein. In some embodiments, the TadA*8 is TadA*8a, TadA*8b, TadA*8c, TadA*8d, or TadA*8e. In some embodiments, the TadA*8 is TadA*8e. In one embodiment, an adenosine deaminase is a TadA*8 that comprises or consists essentially of SEQ ID NO: 316 or a fragment thereof having adenosine deaminase activity.

TABLE 5D
Select TadA*8 Variants

| | | TadA amino acid number | | | | | | | | | |
|---|---|---|---|---|---|---|---|---|---|---|---|
| | TadA | 26 | 88 | 109 | 111 | 119 | 122 | 147 | 149 | 166 | 167 |
| | TadA- | R | V | A | T | D | H | Y | F | T | D |
| | 7.10 | | | | | | | | | | |
| PANCE 1 | | | | | R | | | | | | |
| PANCE 2 | | | | S/T | R | | | | | | |
| PACE | TadA-8a | C | | S | R | N | N | D | Y | I | N |
| | TadA-8b | | A | S | R | N | N | | Y | I | N |
| | TadA-8c | C | | S | R | N | N | | Y | I | N |
| | TadA-8d | | A | | R | N | | | Y | | |
| | TadA-8e | | | S | R | N | N | D | Y | I | N |

[0210] In some embodiments, the TadA variant is a variant as shown in Table SE. Table SE shows certain amino acid position numbers in the TadA amino acid sequence and the amino acids present in those positions in the TadA*7.10 adenosine deaminase. In some embodiments, the TadA variant is MSP605, MSP680, MSP823, MSP824, MSP825, MSP827, MSP828, or MSP829. In some embodiments, the TadA variant is MSP828. In some embodiments, the TadA variant is MSP829.

TABLE 5E
TadA Variants

| | TadA Amino Acid Number | | | | | | | |
|---|---|---|---|---|---|---|---|---|
| Variant | 36 | 76 | 82 | 147 | 149 | 154 | 157 | 167 |
| TadA-7.10 | L | I | V | Y | F | Q | N | D |
| MSP605 | | | G | T | | S | | |
| MSP680 | | Y | G | T | | S | | |
| MSP823 | H | | G | T | | S | K | |
| MSP824 | | | G | D | Y | S | | N |
| MSP825 | H | | G | D | Y | S | K | N |
| MSP827 | H | Y | G | T | | S | K | |
| MSP828 | | Y | G | D | Y | S | | N |
| MSP829 | H | Y | G | D | Y | S | K | N |

TABLE 5F
TadA Variants

| Description | | | | | | | | | | |
|---|---|---|---|---|---|---|---|---|---|---|
| Amino Acid No. | 23 | 36 | 48 | 51 | 76 | 82 | 84 | 106 | 108 | 123 |
| TadA (wt) | W | H | P | R | I | V | L | A | D | H |
| TadA*7.10 | R | L | A | L | I | V | F | V | N | Y |
| TadA*8.8 | | | | | | | | | | H |
| TadA*8.13 | | | | | Y | | | | | H |
| TadA*8.17 | | | | | | S | | | | |
| TadA*8.20 | | | | | Y | S | | | | H |
| TadA*8.8 + V82T | | | | | | T | | | | |
| TadA*8.8 + | | | | | | T | | | | H |
| V82T + Y147T + Q154S | | | | | | | | | | |
| TadA*8.17 + V82T | | | | | | T | | | | |
| TadA*8.17 + | | | | | | T | | | | |
| V82T + Y147T + Q154S | | | | | | | | | | |
| TadA*8.20 + V82T | | | | | Y | T | | | | H |
| TadA*8.20 + | | | | | Y | T | | | | H |
| V82T + Y147T + Q154S | | | | | | | | | | |

| Official Name | | | | | | | | |
|---|---|---|---|---|---|---|---|---|
| Amino Acid No. | 146 | 147 | 152 | 154 | 155 | 156 | 157 | 166 |
| TadA (wt) | S | D | R | Q | E | I | K | T |
| TadA*7.10 | C | Y | P | Q | V | F | N | T |
| TadA (wt) | S | D | R | Q | E | I | K | T |
| TadA*8.8 | | R | | R | | | | |
| TadA*8.13 | | R | | R | | | | |
| TadA*8.17 | | | | R | | | | |
| TadA*8.20 | | R | | R | | | | |
| TadA*8.8 + V82T | | R | | R | | | | |
| TadA*8.8 + | | T | | S | | | | |
| V82T + Y147T + Q154S | | | | | | | | |
| TadA*8.17 + V82T | | | | R | | | | |
| TadA*8.17 + | | T | | S | | | | |
| V82T + Y147T + Q154S | | | | | | | | |
| TadA*8.20 + V82T | | R | | R | | | | |
| TadA*8.20 + | | T | | S | | | | |
| V82T + Y147T + Q154S | | | | | | | | |

[0211] In particular embodiments, the fusion proteins or complexes comprise a single (e.g., provided as a monomer) TadA* (e.g., TadA*8 or TadA*9). Throughout the present disclosure, an adenosine deaminase base editor that comprises a single TadA* domain is indicates using the terminology ABEm or ABE #m, where “#” is an identifying number (e.g., ABE8.20m), where “m” indicates “monomer.” In some embodiments, the TadA* is linked to a Cas9 nickase. In some embodiments, the fusion proteins or complexes of the disclosure comprise as a heterodimer of a wild-type TadA (TadA(wt)) linked to a TadA*. Throughout the present disclosure, an adenosine deaminase base editor that comprises a single TadA* domain and a TadA(wt) domain is indicates using the terminology ABEd or ABE #d, where “#” is an identifying number (e.g., ABE8.20d), where “d” indicates “dimer.” In other embodiments, the fusion proteins or complexes of the disclosure comprise as a heterodimer of a TadA*7.10 linked to a TadA*. In some embodiments, the base editor is ABE8 comprising a TadA* variant monomer. In some embodiments, the base editor is ABE comprising a heterodimer of a TadA* and a TadA(wt). In some embodiments, the base editor is ABE comprising a heterodimer of a TadA* and TadA*7.10. In some embodiments, the base editor is ABE comprising a heterodimer of a TadA*. In some embodiments, the TadA* is selected from Tables 5A-5E.

[0212] In some embodiments, the adenosine deaminase is expressed as a monomer. In other embodiments, the adenosine deaminase is expressed as a heterodimer. In some embodiments, the deaminase or other polypeptide sequence lacks a methionine, for example when included as a component of a fusion protein. This can alter the numbering of positions. However, the skilled person will understand that such corresponding mutations refer to the same mutation.

[0213] Any of the mutations provided herein and any additional mutations (e.g., based on the ecTadA amino acid sequence) can be introduced into any other adenosine deaminases. Any of the mutations provided herein can be made individually or in any combination in a TadA reference sequence or another adenosine deaminase (e.g., ecTadA).

[0214] Details of A to G nucleobase editing proteins are described in International PCT Application No. PCT/US2017/045381 (WO2018/027078) and Gaudelli, N. M., et al., “Programmable base editing of A·T to G·C in genomic DNA without DNA cleavage” Nature, 551, 464-471 (2017), the entire contents of which are hereby incorporated by reference.

[0215] C to T Editing In some embodiments, a base editor disclosed herein comprises a fusion protein or complex comprising cytidine deaminase capable of deaminating a target cytidine (C) base of a polynucleotide to produce uridine (U), which has the base pairing properties of thymine. In some embodiments, for example where the polynucleotide is double-stranded (e.g., DNA), the uridine base can then be substituted with a thymidine base (e.g., by cellular repair machinery) to give rise to a C:G to a T:A transition. In other embodiments, deamination of a C to U in a nucleic acid by a base editor cannot be accompanied by substitution of the U to a T.

[0216] The deamination of a target C in a polynucleotide to give rise to a U is a non-limiting example of a type of base editing that can be executed by a base editor described herein. In another example, a base editor comprising a cytidine deaminase domain can mediate conversion of a cytosine (C) base to a guanine (G) base. For example, a U of a polynucleotide produced by deamination of a cytidine by a cytidine deaminase domain of a base editor can be excised from the polynucleotide by a base excision repair mechanism (e.g., by a uracil DNA glycosylase (UDG) domain), producing an abasic site. The nucleobase opposite the abasic site can then be substituted (e.g., by base repair machinery) with another base, such as a C, by for example a translesion polymerase. Although it is typical for a nucleobase opposite an abasic site to be replaced with a C, other substitutions (e.g., A, G or T) can also occur.

[0217] Accordingly, in some embodiments a base editor described herein comprises a deamination domain (e.g., cytidine deaminase domain) capable of deaminating a target C to a U in a polynucleotide. Further, as described below, the base editor can comprise additional domains which facilitate conversion of the U resulting from deamination to, in some embodiments, a T or a G. For example, a base editor comprising a cytidine deaminase domain can further comprise a uracil glycosylase inhibitor (UGI) domain to mediate substitution of a U by a T, completing a C-to-T base editing event. In another example, the base editor can comprise a uracil stabilizing protein as described herein. In another example, a base editor can incorporate a translesion polymerase to improve the efficiency of C-to-G base editing, since a translesion polymerase can facilitate incorporation of a C opposite an abasic site (i.e., resulting in incorporation of a G at the abasic site, completing the C-to-G base editing event).

[0218] A base editor comprising a cytidine deaminase as a domain can deaminate a target C in any polynucleotide, including DNA, RNA and DNA-RNA hybrids.

[0219] In some embodiments, a cytidine deaminase of a base editor comprises all or a portion (e.g., a functional portion) of an apolipoprotein B mRNA editing complex (APOBEC) family deaminase. APOBEC is a family of evolutionarily conserved cytidine deaminases. Members of this family are C-to-U editing enzymes. The N-terminal domain of APOBEC like proteins is the catalytic domain, while the C-terminal domain is a pseudocatalytic domain. More specifically, the catalytic domain is a zinc dependent cytidine deaminase domain and is important for cytidine deamination. APOBEC family members include APOBEC1, APOBEC2, APOBEC3A, APOBEC3B, APOBEC3C, APOBEC3D (“APOBEC3E” now refers to this), APOBEC3F, APOBEC3G, APOBEC3H, APOBEC4, and Activation-induced (cytidine) deaminase.

[0220] Other exemplary deaminases that can be fused to Cas9 according to aspects of this disclosure are provided below. In embodiments, the deaminases are activation-induced deaminases (AID). It should be understood that, in some embodiments, the active domain of the respective sequence can be used, e.g., the domain without a localizing signal (nuclear localization sequence, without nuclear export signal, cytoplasmic localizing signal).

[0221] Some aspects of the present disclosure are based on the recognition that modulating the deaminase domain catalytic activity of any of the fusion proteins or complexes described herein, for example by making point mutations in the deaminase domain, affect the processivity of the fusion proteins (e.g., base editors) or complexes. For example, mutations that reduce, but do not eliminate, the catalytic activity of a deaminase domain within a base editing fusion protein or complexes can make it less likely that the deaminase domain will catalyze the deamination of a residue adjacent to a target residue, thereby narrowing the deamination window. The ability to narrow the deamination window can prevent unwanted deamination of residues adjacent to specific target residues, which can reduce or prevent off-target effects.

[0222] In some embodiments, an APOBEC deaminase incorporated into a base editor can comprise one or more mutations selected from the group consisting of R33A, K34A, E63A, H102P, D104N, H121R, H122R, H122L, D124N; R126A, R126E, RT18A, W90A, W90Y, and R132E of rAPOBEC1; D316R, D317R, R320A, R320E, R313A, W285A, W285Y, and R326E of hAPOBEC3G; and any alternative mutation at the corresponding position, or one or more corresponding mutations in another APOBEC deaminase. In some embodiments, an APOBEC deaminase incorporated into a base editor can comprise one or more combinations of mutations selected from K34A, H122L, and D124N (AALN); H102P and D104N (evoFERNY derived from FERNY); W90Y and R126E (YE1); W90Y and R132E (YE2); R126E and R132E (EE); W90Y, RI26E, and RI32E (YEE), or rAPOBEC1; and any alternative mutation at the corresponding positions, or one or more corresponding mutations in another APOBEC deaminase.

[0223] A number of modified cytidine deaminases are commercially available, including, but not limited to, SaBE3, SaKKH-BE3, VQR-BE3, EQR-BE3, VRER-BE3, YE1-BE3, EE-BE3, YE2-BE3, and YEE-BE3, which are available from Addgene (plasmids 85169, 85170, 85171, 85172, 85173, 85174, 85175, 85176, 85177). In some embodiments, a deaminase incorporated into a base editor comprises all or a portion (e.g., a functional portion) of an APOBEC1 deaminase.

[0224] In some embodiments, the fusion proteins or complexes of the disclosure comprise one or more cytidine deaminase domains. In some embodiments, the cytidine deaminases provided herein are capable of deaminating cytosine or 5-methylcytosine to uracil or thymine. In some embodiments, the cytidine deaminases provided herein are capable of deaminating cytosine in DNA. The cytidine deaminase may be derived from any suitable organism. In some embodiments, the cytidine deaminase is a naturally-occurring cytidine deaminase that includes one or more mutations corresponding to any of the mutations provided herein. One of skill in the art will be able to identify the corresponding residue in any homologous protein, e.g., by sequence alignment and determination of homologous residues. Accordingly, one of skill in the art would be able to generate mutations in any naturally-occurring cytidine deaminase that corresponds to any of the mutations described herein. In some embodiments, the cytidine deaminase is from a prokaryote. In some embodiments, the cytidine deaminase is from a bacterium. In some embodiments, the cytidine deaminase is from a mammal (e.g., human).

[0225] In some embodiments, the cytidine deaminase comprises an amino acid sequence that is at least 60%, at least 65%, at least 70%, at least 75%, at least 80%, at least 85%, at least 90%, at least 95%, at least 96%, at least 97%, at least 98%, at least 99%, or at least 99.5% identical to any one of the cytidine deaminase amino acid sequences set forth herein. It should be appreciated that cytidine deaminases provided herein may include one or more mutations (e.g., any of the mutations provided herein). Some embodiments provide a polynucleotide molecule encoding the cytidine deaminase nucleobase editor polypeptide of any previous aspect or as delineated herein. In some embodiments, the polynucleotide is codon optimized.

[0226] In embodiments, a fusion protein of the disclosure comprises two or more nucleic acid editing domains.

[0227] Details of C to T nucleobase editing proteins are described in International PCT Application No. PCT/US2016/058344 (WO2017/070632) and Komor, A. C., et al., “Programmable editing of a target base in genomic DNA without double-stranded DNA cleavage” Nature 533, 420-424 (2016), the entire contents of which are hereby incorporated by reference. Further non-limiting examples of C to T nucleobase editing proteins are described in PCT Applications No. PCT/US2020/062428 and PCT/US2019/033848, the entire contents of which are hereby incorporated by reference.

### Cytidine Adenosine Base Editors (CABEs)

[0228] In some embodiments, a base editor described herein comprises an adenosine deaminase variant that has increased cytidine deaminase activity. Such base editors may be referred to as “cytidine adenosine base editors (CABEs)” or “cytosine base editors derived from TadA* (CBE-Ts),” and their corresponding deaminase domains may be referred to as “TadA* acting on DNA cytosine (TADC)” domains or TadA-derived cytidine deaminases (TadA-CD).

[0229] Base editors containing adenosine deaminase variants having both cytidine deaminase and adenosine deaminase activity (i.e., TadA-Dual deaminases) may be referred to as TadA-based dual editors (TadDE). In some instances, an adenosine deaminase variant has both adenine and cytosine deaminase activity (i.e., is a dual deaminase). In some embodiments, the adenosine deaminase variants deaminate adenine and cytosine in DNA. In some embodiments, the adenosine deaminase variants deaminate adenine and cytosine in single-stranded DNA. In some embodiments, the adenosine deaminase variants deaminate adenine and cytosine in RNA. In some embodiments, the adenosine deaminase variant predominantly deaminates cytosine in DNA and/or RNA (e.g., greater than 30%, 40%, 50%, 60%, 70%, 80%, 90%, 95%, or 99% of all deaminations catalyzed by the adenosine deaminase variant, or the number of cytosine deaminations catalyzed by the variant is about or at least about 2-fold, 3-fold, 4-fold, 5-fold, 6-fold, 7-fold, 8-fold, 9-fold, 10-fold, 25-fold, 50-fold, 75-fold, 100-fold, 500-fold, or 1,000-fold greater than the number adenine deaminations catalyzed by the variant). In some embodiments, the adenosine deaminase variant has approximately equal cytosine and adenosine deaminase activity (e.g., the two activities are within about 10% or 20% of each other). In some embodiments, the adenosine deaminase variant has predominantly cytosine deaminase activity, and little, if any, adenosine deaminase activity. In some embodiments, the adenosine deaminase variant has cytosine deaminase activity, and no significant or no detectable adenosine deaminase activity. In some embodiments, the target polynucleotide is present in a cell in vitro or in vivo. In some embodiments, the cell is a bacteria, yeast, fungi, insect, plant, or mammalian cell. Examples of adenosine deaminase variants having increased cytidine deaminase activity include those described in International Patent Application Publications No. WO 2024/040083 and WO 2022/204574, the disclosures of which are hereby incorporated by reference in their entireties for all purposes.

[0230] In some embodiments, the CABE comprises a bacterial TadA deaminase variant (e.g., ecTadA). In some embodiments, the CABE comprises a truncated TadA deaminase variant. In some embodiments, the CABE comprises a fragment of a TadA deaminase variant. In some embodiments, the CABE comprises a TadA*8.20 variant.

[0231] In some embodiments, an adenosine deaminase variant of the disclosure is a TadA adenosine deaminase comprising one or more alterations that increase cytosine deaminase activity (e.g., at least about 10-fold, 20-fold, 30-fold, 40-fold, 50-fold, 60-fold, 70-fold or more increase) while maintaining adenosine deaminase activity (e.g., at least about 30%, 40%, 50% or more of the activity of a reference adenosine deaminase (e.g., TadA*8.20 or TadA*8.19)). In some instances, the adenosine deaminase variant comprises one or more alterations that increase cytosine deaminase activity (e.g., at least about 10-fold, 20-fold, 30-fold, 40-fold, 50-fold, 60-fold, 70-fold or more increase) relative to the activity of a reference adenosine deaminase and comprise undetectable adenosine deaminase activity or adenosine deaminase activity that is less than 30%, 20%, 10%, or 5% of that of a reference adenosine deaminase. In some embodiments, the reference adenosine deaminase is TadA*8.20 or TadA*8.19.

[0232] In some embodiments, the adenosine deaminase variant is an adenosine deaminase comprising two or more alterations at an amino acid position selected from the group consisting of 2, 4, 6, 8, 13, 17, 23, 27, 29, 30, 47, 48, 49, 67, 76, 77, 82, 84, 96, 100, 107, 112, 114, 115, 118, 119, 122, 127, 142, 143, 147, 149, 158, 159, 162 165, 166, and 167, of an amino acid sequence having at least about 70%, 75%, 80%, 85%, 90%, 95%, 98%, 99% or greater identity to SEQ ID NO: 1, or a corresponding alteration in another deaminase. I In some embodiments, the adenosine deaminase variant is an adenosine deaminase comprising one or more alterations selected from the group consisting of S2H, V4K, V4S, V4T, V4Y, F6G, F6H, F6Y, H8Q, R13G, T17A, T17W, R23Q, E27C, E27G, E27H, E27K, E27Q, E27S, E27G, P29A, P29G, P29K, V30F, V301, R47G, R47S, A48G, 149K, 149M, 149N, 149Q, 149T, G67W, 176H, 176R, 176W, Y76H, Y76R, Y76W, F84A, F84M, H96N, G100A, G100K, T111H, G112H, A114C, G115M, M118L, H122G, H122R, H122T, N127I, N127K, N127P, A142E, R147H, A158V, Q159S, A162C, A162N, A162Q, and S165P of an amino acid sequence having at least about 70%, 75%, 80%, 85%, 90%, 95%, 98%, 99% or greater identity to SEQ ID NO: 1, or a corresponding alteration in another deaminase.

[0233] In some embodiments, the adenosine deaminase variant is an adenosine deaminase comprising an amino acid alteration or combination of amino acid alterations selected from those listed in any of Tables 6A-6F.

[0234] The residue identity of exemplary adenosine deaminase variants that are capable of deaminating adenine and/or cytidine in a target polynucleotide (e.g., DNA) is provided in Tables 6A-6F below. Further examples of adenosine deaminase variants include the following variants of 1.17 (see Table 6A): 1.17+E27H; 1.17+E27K; 1.17+E27S; 1.17+E27S+149K; 1.17+E27G; 1.17+149N; 1.17+E27G+I49N; and 1.17+E27Q. In some embodiments, any of the amino acid alterations provided herein are substituted with a conservative amino acid. Additional mutations known in the art can be further added to any of the adenosine deaminase variants provided herein.

[0235] In some embodiments, the base editor systems comprising a CABE provided herein have at least about a 30%, 40%, 50%, 60%, 70% or more C to T editing activity in a target polynucleotide (e.g., DNA). In some embodiments, a base editor system comprising a CABE as provided herein has an increased C to T base editing activity (e.g., increased at least about 30-fold, 40-fold, 50-fold, 60-fold, 70-fold or more) relative to a reference base editor system comprising a reference adenosine deaminase (e.g., TadA*8.20 or TadA*8.19).

TABLE 6A
Adenosine Deaminase Variants. Mutations are indicated with reference to
TadA*8.20.

| | location in structure | | | | | | | | | | | |
|---|---|---|---|---|---|---|---|---|---|---|---|---|
| | N/A | Sh1 | Sh1 | Sh1 | NAS | NAS | NAS | NAS | | S | | |
| | Amino Acid No. (*START Met is AA#1) | | | | | | | | | | | |
| | 2 | 8 | 13 | 17 | 27 | 47 | 48 | 49 | 67 | 76 | 77 | |
| TadA*8.20 | S | | R | T | E | R | A | I | G | Y | D | |
| TadA*8.19 | | | | | | | | | | I | | |
| 1.1 | | | | | H | | | | | I | | |
| 1.2 | | | | | H | | | K | | I | | |
| 1.3 | | | | | S | | | K | | I | | |
| 1.4 | | | | | S | | | K | | I | | |
| 1.5 | | | | | K | | | | | | | |
| 1.6 | | | | | K | | | | | | | |
| 1.7 | | | | | H | | | | | I | | |
| 1.8 | | | | | S | | | K | M | | | |
| 1.9 | | | | | | | | T | W | | | |
| 1.10 | | | | | C | | | | | I | | |
| 1.11 | | | G | | Q | | | | | | | |
| 1.12 | | | | A | H | | | M | | I | | |
| 1.13 | | | | | | | | Q | | I | | |
| 1.14 | H | | | | | | | K | | I | | |
| 1.15 | | | | | | S | | | | | | |
| 1.16 | | Q | | | | | | Q | | I | | |
| 1.17 | | | | A | | | G | | | | | |
| 1.18 | | | | | G | | | | | | | |
| 1.19 | | | | | G | | | N | | | | |
| 1.20 | | | | | G | | | | | | G | |
| | location in structure | | | | | | | | | | | |
| | I | NAS | | NAS | S | | S | S | S | | S | |
| | Amino Acid No. (*START Met is AA#1) | | | | | | | | | | | |
| | 82 | 84 | 96 | 107 | 112 | 115 | 118 | 119 | 127 | 142 | 162 | 165 |
| TadA*8.20 | S | F | H | R | G | G | M | D | N | A | A | S |
| TadA*8.19 | | | | | | | | | | | | |
| 1.1 | | M | | | | | | | | | | |
| 1.2 | | | | | | | | | | | | |
| 1.3 | | | | | | | | | | | | |
| 1.4 | | | | | | | | | | | N | |
| 1.5 | | | | | | | | | | | | |
| 1.6 | | | | | | | | N | | | | |
| 1.7 | | | | | | | | | | | | |
| 1.8 | | | | | | | | | | | | |
| 1.9 | | | N | | | | | | | | | |
| 1.10 | | | | | | | | N | | | | |
| 1.11 | | | | | | | | | K | | | |
| 1.12 | | | | | | | L | | | | | |
| 1.13 | | | | | | M | | | | | | |
| 1.14 | | | | | H | | | | | | | |
| 1.15 | | | | C | | | | | | | | |
| 1.16 | | | | | | | | | | | | |
| 1.17 | T | | | | | | | | | E | | |
| 1.18 | | | | | | | | | | | | |
| 1.19 | | | | | | | | | | | | |
| 1.20 | | | | | | | | | | | | P |

“I” indicates “Internal,”
“S” indicates “Surface,” and
“NAS” indicates “Near Active Site.”

TABLE 6B
Adenosine deaminase variants. Mutations are
indicated with reference to TadA*8.20.

| Position No. | 27 | 29 | 30 | 49 | 82 | 84 | 107 | 112 | 115 | 142 |
|---|---|---|---|---|---|---|---|---|---|---|
| TadA*8.20 | E | P | V | I | S | F | R | G | G | A |
| Alterations | G/S/H | G/A/K | I/L/F | K | T | L/A | C | H | M | E |
| Evaluated | | | | | | | | | | |
| S1.1 | S | | | K | T | | | | | |
| S1.2 | S | | | K | T | | C | | | |
| S1.3 | S | | | K | T | | | H | | |
| S1.4 | S | | | K | T | | | | M | |
| S1.5 | S | | | K | T | | | | | E |
| S1.6 | S | | | K | T | | C | H | | |
| S1.7 | S | | | K | T | | C | | M | |
| S1.8 | S | | | K | T | | C | | | E |
| S1.9 | S | | | K | T | | | H | | E |
| S1.10 | S | | | K | T | | | | M | E |
| S1.11 | S | | | K | T | | C | H | M | E |
| S1.12 | S | | I | K | T | | | | | |
| S1.13 | S | | I | K | T | | C | | | |
| S1.14 | S | | I | K | T | | | H | | |
| S1.15 | S | | I | K | T | | | | M | |
| S1.16 | S | | I | K | T | | | | | E |
| S1.17 | S | | I | K | T | | C | H | | |
| S1.18 | S | | I | K | T | | C | | M | |
| S1.19 | S | | I | K | T | | C | | | E |
| S1.20 | S | | I | K | T | | | H | | E |
| S1.21 | S | | I | K | T | | | | M | E |
| S1.22 | S | | I | K | T | | C | H | M | E |
| S1.23 | S | | L | K | T | | | | | |
| S1.24 | S | | L | K | T | | C | | | |
| S1.25 | S | | L | K | T | | | H | | |
| S1.26 | S | | L | K | T | | | | M | |
| S1.27 | S | | L | K | T | | | | | E |
| S1.28 | S | | L | K | T | | C | H | | |
| S1.29 | S | | L | K | T | | C | | M | |
| S1.30 | S | | L | K | T | | C | | | E |
| S1.31 | S | | L | K | T | | | H | | E |
| S1.32 | S | | L | K | T | | | | M | E |
| S1.33 | S | | L | K | T | | C | H | M | E |
| S1.34 | S | | F | K | T | A | | | | |
| S1.35 | S | | F | K | T | A | C | | | |
| S1.36 | S | | F | K | T | A | | H | | |
| S1.37 | S | | F | K | T | A | | | M | |
| S1.38 | S | | F | K | T | A | | | | E |
| S1.39 | S | | F | K | T | A | C | H | | |
| S1.40 | S | | F | K | T | A | C | | M | |
| S1.41 | S | | F | K | T | A | C | | | E |
| S1.42 | S | | F | K | T | A | | H | | E |
| S1.43 | S | | F | K | T | A | | | M | E |
| S1.44 | S | | F | K | T | A | C | H | M | E |
| S1.45 | S | | | K | T | L | | | | |
| S1.46 | S | | | K | T | L | C | | | |
| S1.47 | S | | | K | T | L | | H | | |
| S1.48 | S | | | K | T | L | | | M | |
| S1.49 | S | | | K | T | L | | | | E |
| S1.50 | S | | | K | T | L | C | H | | |
| S1.51 | S | | | K | T | L | C | | M | |
| S1.52 | S | | | K | T | L | C | | | E |
| S1.53 | S | | | K | T | L | | H | | E |
| S1.54 | S | | | K | T | L | | | M | E |
| S1.55 | S | | | K | T | L | C | H | M | E |
| S1.56 | S | | I | K | T | L | | | | |
| S1.57 | S | | I | K | T | L | C | | | |
| S1.58 | S | | I | K | T | L | | H | | |
| S1.59 | S | | I | K | T | L | | | M | |
| S1.60 | S | | I | K | T | L | | | | E |
| S1.61 | S | | I | K | T | L | C | H | | |
| S1.62 | S | | I | K | T | L | C | | M | |
| S1.63 | S | | I | K | T | L | C | | | E |
| S1.64 | S | | I | K | T | L | | H | | E |
| S1.65 | S | | I | K | T | L | | | M | E |
| S1.66 | S | | I | K | T | L | C | H | M | E |
| S1.67 | S | G | | K | T | | | | | |
| S1.68 | S | G | | K | T | | C | | | |
| S1.69 | S | G | | K | T | | | H | | |
| S1.70 | S | G | | K | T | | | | M | |
| S1.71 | S | G | | K | T | | | | | E |
| S1.72 | S | G | | K | T | | C | H | | |
| S1.73 | S | G | | K | T | | C | | M | |
| S1.74 | S | G | | K | T | | C | | | E |
| S1.75 | S | G | | K | T | | | H | | E |
| S1.76 | S | G | | K | T | | | | M | E |
| S1.77 | S | G | | K | T | | C | H | M | E |
| S1.78 | | G | | K | T | | | | | |
| S1.79 | | G | | K | T | | C | | | |
| S1.80 | | G | | K | T | | | H | | |
| S1.81 | | G | | K | T | | | | M | |
| S1.82 | | G | | K | T | | | | | E |
| S1.83 | | G | | K | T | | C | H | | |
| S1.84 | | G | | K | T | | C | | M | |
| S1.85 | | G | | K | T | | C | | | E |
| S1.86 | | G | | K | T | | | H | | E |
| S1.87 | | G | | K | T | | | | M | E |
| S1.88 | | G | | K | T | | C | H | M | E |
| S1.89 | | K | | K | T | | | | | |
| S1.90 | | K | | K | T | | C | | | |
| S1.91 | | K | | K | T | | | H | | |
| S1.92 | | K | | K | T | | | | M | |
| S1.93 | | K | | K | T | | | | | E |
| S1.94 | | K | | K | T | | C | H | | |
| S1.95 | | K | | K | T | | C | | M | |
| S1.96 | | K | | K | T | | C | | | E |
| S1.97 | | K | | K | T | | | H | | E |
| S1.98 | | K | | K | T | | | | M | E |
| S1.99 | | K | | K | T | | C | H | M | E |
| S1.100 | | K | I | K | T | | | | | |
| S1.101 | | K | I | K | T | | C | | | |
| S1.102 | | K | I | K | T | | | H | | |
| S1.103 | | K | I | K | T | | | | M | |
| S1.104 | | K | I | K | T | | | | | E |
| S1.105 | | K | I | K | T | | C | H | | |
| S1.106 | | K | I | K | T | | C | | M | |
| S1.107 | | K | I | K | T | | C | | | E |
| S1.108 | | K | I | K | T | | | H | | E |
| S1.109 | | K | I | K | T | | | | M | E |
| S1.110 | | K | I | K | T | | C | H | M | E |
| S1.111 | | K | | K | T | L | | | | |
| S1.112 | | K | | K | T | L | C | | | |
| S1.113 | | K | | K | T | L | | H | | |
| S1.114 | | K | | K | T | L | | | M | |
| S1.115 | | K | | K | T | L | | | | E |
| S1.116 | | K | | K | T | L | C | H | | |
| S1.117 | | K | | K | T | L | C | | M | |
| S1.118 | | K | | K | T | L | C | | | E |
| S1.119 | | K | | K | T | L | | H | | E |
| S1.120 | | K | | K | T | L | | | M | E |
| S1.121 | | K | | K | T | L | C | H | M | E |
| S1.122 | | K | I | K | T | L | | | | |
| S1.123 | | K | I | K | T | L | C | | | |
| S1.124 | | K | I | K | T | L | | H | | |
| S1.125 | | K | I | K | T | L | | | M | |
| S1.126 | | K | I | K | T | L | | | | E |
| S1.127 | | K | I | K | T | L | C | H | | |
| S1.128 | | K | I | K | T | L | C | | M | |
| S1.129 | | K | I | K | T | L | C | | | E |
| S1.130 | | K | I | K | T | L | | H | | E |
| S1.131 | | K | I | K | T | L | | | M | E |
| S1.132 | | K | I | K | T | L | C | H | M | E |
| S1.133 | G | | | K | T | | | | | |
| S1.134 | G | | | K | T | | C | | | |
| S1.135 | G | | | K | T | | | H | | |
| S1.136 | G | | | K | T | | | | M | |
| S1.137 | G | | | K | T | | | | | E |
| S1.138 | G | | | K | T | | C | H | | |
| S1.139 | G | | | K | T | | C | | M | |
| S1.140 | G | | | K | T | | C | | | E |
| S1.141 | G | | | K | T | | | H | | E |
| S1.142 | G | | | K | T | | | | M | E |
| S1.143 | G | | | K | T | | C | H | M | E |
| S1.144 | H | | | K | T | | | | | |
| S1.145 | H | | | K | T | | C | | | |
| S1.146 | H | | | K | T | | | H | | |
| S1.147 | H | | | K | T | | | | M | |
| S1.148 | H | | | K | T | | | | | E |
| S1.149 | H | | | K | T | | C | H | | |
| S1.150 | H | | | K | T | | C | | M | |
| S1.151 | H | | | K | T | | C | | | E |
| S1.152 | H | | | K | T | | | H | | E |
| S1.153 | H | | | K | T | | | | M | E |
| S1.154 | H | | | K | T | | C | H | M | E |
| S1.155 | S | | | | T | | | | | |
| S1.156 | S | | | | T | | C | | | |
| S1.157 | S | | | | T | | | H | | |
| S1.158 | S | | | | T | | | | M | |
| S1.159 | S | | | | T | | | | | E |
| S1.160 | S | | | | T | | C | H | | |
| S1.161 | S | | | | T | | C | | M | |
| S1.162 | S | | | | T | | C | | | E |
| S1.163 | S | | | | T | | | H | | E |
| S1.164 | S | | | | T | | | | M | E |
| S1.165 | S | | | | T | | C | H | M | E |
| S1.166 | | A | | | T | | | | | |
| S1.167 | | A | | | T | | C | | | |
| S1.168 | | A | | | T | | | H | | |
| S1.169 | | A | | | T | | | | M | |
| S1.170 | | A | | | T | | | | | E |
| S1.171 | | A | | | T | | C | H | | |
| S1.172 | | A | | | T | | C | | M | |
| S1.173 | | A | | | T | | C | | | E |
| S1.174 | | A | | | T | | | H | | |
| S1.175 | | A | | | T | | | | M | E |
| S1.176 | | A | | | T | | C | H | M | E |
| S1.177 | S | | I | | T | | | | | |
| S1.178 | S | | I | | T | | C | | | |
| S1.179 | S | | I | | T | | | H | | |
| S1.180 | S | | I | | T | | | | M | |
| S1.181 | S | | I | | T | | | | | E |
| S1.182 | S | | I | | T | | C | H | | |
| S1.183 | S | | I | | T | | C | | M | |
| S1.184 | S | | I | | T | | C | | | E |
| S1.185 | S | | I | | T | | | H | | E |
| S1.186 | S | | I | | T | | | | M | E |
| S1.187 | S | | I | | T | | C | H | M | E |
| S1.188 | | A | I | | T | L | | | | |
| S1.189 | | A | I | | T | L | C | | | |
| S1.190 | | A | I | | T | L | | H | | |
| S1.191 | | A | I | | T | L | | | M | |
| S1.192 | | A | I | | T | L | | | | E |
| S1.193 | | A | I | | T | L | C | H | | |
| S1.194 | | A | I | | T | L | C | | M | |
| S1.195 | | A | I | | T | L | C | | | E |
| S1.196 | | A | I | | T | L | | H | | E |
| S1.197 | | A | I | | T | L | | | M | E |
| S1.198 | | A | I | | T | L | C | H | M | E |
| S1.199 | S | A | L | K | T | L | C | H | M | E |

TABLE 6C
Adenosine deaminase variants. Mutations are indicated
with reference to variant 1.2 (Table 6A) .

| | Alternative | Residue identity (START Met is amino | | | | | | | | |
|---|---|---|---|---|---|---|---|---|---|---|
| Variant | Variant | acid #1) | | | | | | | | |
| Name | Names | 4 | 6 | 17 | 23 | 76 | 77 | 100 | 111 | 114 |
| Reference | 1.2 (see Table 6A) | V | F | T | R | I | D | G | T | A |
| TadAC2.1 | pDKL-135; 2.1 | K | | | | | | | | C |
| TadAC2.2 | pDKL-136; 2.2 | K | | | | | G | | | |
| TadAC2.3 | pDKL-137; 2.3 | | Y | | | | | A | | |
| TadAC2.4 | pDKL-138; 2.4 | T | | | | R | | | | |
| TadAC2.5 | pDKL-139; 2.5 | | Y | | | W | | | | |
| TadAC2.6 | pDKL-140; 2.6 | | Y | | | | | | | |
| TadAC2.7 | pDKL-141; 2.7 | | Y | | | | | | | C |
| TadAC2.8 | pDKL-142; 2.8 | | Y | | | | | | | |
| TadAC2.9 | pDKL-143; 2.9 | K | | | | W | | | | |
| TadAC2.10 | pDKL-144; 2.10 | | G | | | R | | K | | |
| TadAC2.11 | pDKL-145; 2.11 | | H | | | | | | | |
| TadAC2.12 | pDKL-146; 2.12 | | | | | | | | | C |
| TadAC2.13 | pDKL-147; 2.13 | | Y | | | H | | | | |
| TadAC2.14 | pDKL-148; 2.14 | | | | | | | | | |
| TadAC2.15 | pDKL-149; 2.15 | | | | Q | R | | | | |
| TadAC2.16 | pDKL-150; 2.16 | | | | | H | | | | |
| TadAC2.17 | pDKL-151; 2.17 | | Y | | | | | | H | |
| TadAC2.18 | pDKL-152; 2.18 | | | | | W | | | | |
| TadAC2.19 | pDKL-153; 2.19 | | | | | | | | H | |
| TadAC2.20 | pDKL-154; 2.20 | | | | | | | | | |
| TadAC2.21 | pDKL-155; 2.21 | | Y | | | R | | | | |
| TadAC2.22 | pDKL-156; 2.22 | | | W | | H | | | | |
| TadAC2.23 | pDKL-157; 2.23 | S | | | | Y | | | | |
| TadAC2.24 | pDKL-158; 2.24 | | | | | | | | | |
| | Alternative | Residue identity (START Met is | | | | | | | | |
| Variant | Variant | amino acid #1) | | | | | | | | |
| Name | Names | 119 | 122 | 127 | 143 | 147 | 158 | 159 | 162 | 166 |
| Reference | 1.2 (see Table 6A) | D | H | N | A | R | A | Q | A | T |
| TadAC2.1 | pDKL-135; 2.1 | | | | | | | | | |
| TadAC2.2 | pDKL-136; 2.2 | | | | | | | | | |
| TadAC2.3 | pDKL-137; 2.3 | | R | | | | | | | |
| TadAC2.4 | pDKL-138; 2.4 | | G | | | | | | | |
| TadAC2.5 | pDKL-139; 2.5 | | | | | | | | | |
| TadAC2.6 | pDKL-140; 2.6 | N | | | | | | | | |
| TadAC2.7 | pDKL-141; 2.7 | | | | | | | | | |
| TadAC2.8 | pDKL-142; 2.8 | | | | | | | | | |
| TadAC2.9 | pDKL-143; 2.9 | | T | | | | | | | |
| TadAC2.10 | pDKL-144; 2.10 | | | | | | | | | |
| TadAC2.11 | pDKL-145; 2.11 | | N | | | | | | | |
| TadAC2.12 | pDKL-146; 2.12 | | | | | | | | | |
| TadAC2.13 | pDKL-147; 2.13 | | R | | | | | | | I |
| TadAC2.14 | pDKL-148; 2.14 | | | P | | | | | | |
| TadAC2.15 | pDKL-149; 2.15 | | | | | | | | | |
| TadAC2.16 | pDKL-150; 2.16 | | R | | | | V | | | |
| TadAC2.17 | pDKL-151; 2.17 | | | | | | | | | |
| TadAC2.18 | pDKL-152; 2.18 | | | | | | | | | |
| TadAC2.19 | pDKL-153; 2.19 | | G | | | | | | C | |
| TadAC2.20 | pDKL-154; 2.20 | | | | E | | | | | |
| TadAC2.21 | pDKL-155; 2.21 | | | | | | | | | |
| TadAC2.22 | pDKL-156; 2.22 | | G | | | | V | | | |
| TadAC2.23 | pDKL-157; 2.23 | | | | E | | | S | | |
| TadAC2.24 | pDKL-158; 2.24 | | | I | | | | | Q | |

TABLE 6D
Adenosine deaminase variants. Mutations are indicated with reference to
TadA*8.20.

| AA Positions | 6 | 27 | 49 | 76 | 77 | 82 | 107 | 112 | 114 | 115 | 119 | 122 | 127 | 142 | 143 |
|---|---|---|---|---|---|---|---|---|---|---|---|---|---|---|---|
| TadA*8.20 | F | E | I | Y | D | S | R | G | A | G | D | H | N | A | A |
| S1.154 | F | H | K | Y | D | T | C | H | | M | | | | E | |
| Alterations | Y | | | W | G | | | | C | | N | G | P | | E |
| from Table | | | | | | | | | | | | | | | |
| 6C | | | | | | | | | | | | | | | |
| S2.1 | Y | H | K | W | | T | C | H | | M | | | | E | |
| S2.2 | Y | H | K | | G | T | C | H | | M | | | | E | |
| S2.3 | Y | H | K | | | T | C | H | C | M | | | | E | |
| S2.4 | Y | H | K | | | T | C | H | | M | N | | | E | |
| S2.5 | Y | H | K | | | T | C | H | | M | | G | | E | |
| S2.6 | Y | H | K | | | T | C | H | | M | | | P | E | |
| S2.7 | Y | H | K | | | T | C | H | | M | | | | E | E |
| S2.8 | Y | H | K | | | T | C | H | | M | | | | A | E |
| S2.9 | Y | H | K | W | G | T | C | H | | M | | | | E | |
| S2.10 | Y | H | K | W | | T | C | H | C | M | | | | E | |
| S2.11 | Y | H | K | W | | T | C | H | | M | N | | | E | |
| S2.12 | Y | H | K | W | | T | C | H | | M | | G | | E | |
| S2.13 | Y | H | K | W | | T | C | H | | M | | | P | E | |
| S2.14 | Y | H | K | W | | T | C | H | | M | | | | E | E |
| S2.15 | Y | H | K | W | | T | C | H | | M | | | | A | E |
| S2.16 | Y | H | K | | G | T | C | H | C | M | | | | E | |
| S2.17 | Y | H | K | | G | T | C | H | | M | N | | | E | |
| S2.18 | Y | H | K | | G | T | C | H | | M | | G | | E | |
| S2.19 | Y | H | K | | G | T | C | H | | M | | | P | E | |
| S2.20 | Y | H | K | | G | T | C | H | | M | | | | E | E |
| S2.21 | Y | H | K | | G | T | C | H | | M | | | | A | E |
| S2.22 | Y | H | K | | | T | C | H | C | M | N | | | E | |
| S2.23 | Y | H | K | | | T | C | H | C | M | | G | | E | |
| S2.24 | Y | H | K | | | T | C | H | C | M | | | P | E | |
| S2.25 | Y | H | K | | | T | C | H | | M | N | G | | E | |
| S2.26 | Y | H | K | | | T | C | H | | M | N | | P | E | |
| S2.27 | Y | H | K | | | T | C | H | | M | | G | P | E | |
| S2.28 | Y | H | K | W | G | T | C | H | C | M | | | | E | |
| S2.29 | Y | H | K | W | G | T | C | H | | M | N | | | E | |
| S2.30 | Y | H | K | W | G | T | C | H | | M | | G | | E | |
| S2.31 | Y | H | K | W | G | T | C | H | | M | | | P | E | |
| S2.32 | Y | H | K | W | G | T | C | H | | M | | | | E | E |
| S2.33 | Y | H | K | W | G | T | C | H | | M | | | | A | E |
| S2.34 | Y | H | K | W | | T | C | H | C | M | N | | | E | |
| S2.35 | Y | H | K | W | | T | C | H | C | M | | G | | E | |
| S2.36 | Y | H | K | W | | T | C | H | C | M | | | P | E | |
| S2.37 | Y | H | K | W | | T | C | H | C | M | | | | E | E |
| S2.38 | Y | H | K | W | | T | C | H | C | M | | | | A | E |
| S2.39 | Y | H | K | W | | T | C | H | | M | N | G | | E | |
| S2.40 | Y | H | K | W | | T | C | H | | M | N | | P | E | |
| S2.41 | Y | H | K | W | | T | C | H | | M | | G | P | E | |
| S2.42 | Y | H | K | W | | T | C | H | C | M | N | G | | E | |
| S2.43 | Y | H | K | W | | T | C | H | C | M | N | | P | E | |
| S2.44 | Y | H | K | W | | T | C | H | C | M | | G | P | E | |
| S2.45 | Y | H | K | W | G | T | C | H | C | M | N | | | E | |
| S2.46 | Y | H | K | W | G | T | C | H | C | M | | G | | E | |
| S2.47 | Y | H | K | M | G | T | C | H | C | M | | | P | E | |
| S2.48 | Y | H | K | W | G | T | C | H | C | M | | | | E | E |
| S2.49 | Y | H | K | W | G | T | C | H | C | M | | | | A | E |
| S2.50 | Y | H | K | W | G | T | C | H | C | M | N | G | | E | |
| S2.51 | Y | H | K | M | G | T | C | H | C | M | N | | P | E | |
| S2.52 | Y | H | K | W | G | T | C | H | C | M | | G | P | E | |
| S2.53 | Y | H | K | M | | T | C | H | C | M | N | G | P | E | E |
| S2.54 | Y | H | K | W | | T | C | H | C | M | N | G | P | A | E |
| S2.55 | Y | H | K | W | G | T | C | H | C | M | N | G | P | E | E |
| S2.56 | Y | H | K | W | G | T | C | H | C | M | N | G | P | A | E |

TABLE 6E
Hybrid constructs. Mutations are indicated with reference to TadA*7.10.

| | TadA amino acid subsitutions | | | | | | | | | | | |
|---|---|---|---|---|---|---|---|---|---|---|---|---|
| | 76 | 82 | 109 | 111 | 119 | 122 | 123 | 147 | 149 | 154 | 166 | 167 |
| TadA*7.10 | I | V | A | T | D | H | Y | Y | F | Q | T | D |
| TadA*8e | | | S | R | N | N | | D | Y | | I | N |
| TadA*8.20 | Y | S | | | | | H | R | | R | | |
| TadA*8.17 | | S | | | | | | | | R | | |
| pNMG-B878 | Y | S | | | | | H | D | | R | | |
| pNMG-B879 | Y | S | | | | | H | R | Y | R | | |
| pNMG-B880 | Y | S | | | | | H | R | | R | I | |
| pNMG-B881 | Y | S | | | | | H | R | | R | | N |
| pNMG-B882 | Y | S | | | | | H | D | Y | R | I | N |
| pNMG-B883 | Y | S | | R | N | | H | R | | R | | |
| pNMG-B884 | Y | S | S | R | N | N | H | R | | R | | |
| pNMG-B885 | Y | S | S | | | | H | R | | R | | |
| pNMG-B886 | Y | S | | R | | | H | R | | R | | |
| pNMG-B887 | Y | S | | | N | | H | R | | R | | |
| pNMG-B888 | Y | S | | | | N | H | R | | R | | |
| pNMG-B889 | Y | S | S | R | | | H | R | | R | | |
| pNMG-B890 | Y | S | | | N | N | H | R | | R | | |
| pNMG-B891 | Y | S | S | R | N | N | H | D | Y | R | I | N |

TABLE 6F
Base editor variants. Mutations are indicated with reference to TadA*8.19/8.20.

| AA positions: | 17 | 27 | 48 | 49 | 76 | 82 | 84 | 118 | 142 | 147 | 149 | 166 | 167 |
|---|---|---|---|---|---|---|---|---|---|---|---|---|---|
| ABE8.19m/8.20m | T | E | A | I | Y/I | S | F | M | A | Y | F | T | D |
| 1.1 + 8e(B879) | | H | | | I | | M | | | | Y | | |
| 1.2 + 8e(B879) | | H | | K | I | | | | | | Y | | |
| 1.12 + 8e(B879) | A | H | | M | I | | | | | | Y | | |
| 1.17 + 8e(B879) | A | | G | | | T | | | E | | Y | | |
| 1.18 + 8e(B879) | | G | | | | | | | | | Y | | |
| 1.19 + 8e(B879) | | G | | N | | | | | | | Y | | |
| 1.1 + 8e(B882) | | H | | | I | | M | | | D | Y | I | N |
| 1.2 + 8e(B882) | | H | | K | I | | | | | D | Y | I | N |
| 1.12 + 8e(B882) | A | H | | M | I | | | L | | D | Y | I | N |
| 1.17 + 8e(B882) | A | | G | | | T | | | E | D | Y | I | N |
| 1.18 + 8e(B882) | | G | | | | | | | | D | Y | I | N |
| 1.19 + 8e(B882) | | G | | N | | | | | | D | Y | I | N |

[0236] A TadA-derived cytidine deaminase (e.g., TadA-CD), according to certain embodiments, comprises an amino acid sequence that is at least 80% identical, at. least 85% identical, at least 90% identical, at least 95% identical, at least 98% identical, at least 99% identical, and at least 99.5% identical to the amino acid sequence of SEQ ID NO: 489, wherein residue 27 of SEQ ID NO: 489 is any amino acid expect for E (glutamic acid). TadA-CDs with other sequence homologies are also possible. For example, in certain embodiments, the TadA-derived cytidine deaminase (e.g., TadA-CD) comprises an amino acid sequence that is at least 80% identical, at least 85% identical, at least 90% identical, at least 95% identical, at least 98% identical, at least 99% identical, and at least 99.5% identical to the amino acid sequence of SEQ ID NO: 489, wherein residue 28 of SEQ ID NO: 489 is any amino acid expect for V (valine). In another exemplary embodiment, the TadA-derived cytidine deaminase is at least 80% identical, at least 85% identical, at least 90% identical, at least 95% identical, at least 98% identical, at least 99% identical, and at least 99.5% identical to the amino acid sequence of SEQ ID NO: 489, wherein residue 96 of SEQ ID NO: 489 is any amino acid expect for H (histidine). In another exemplary embodiment, the TadA-derived cytidine deaminase is at least 80% identical, at least 85% identical, at least 90% identical, at least 95% identical, at least 98% identical, at least 99% identical, and at least 99.5% identical to the amino acid sequence of SEQ ID NO: 489, wherein residue 26 of SEQ ID NO: 489 is any amino acid expect for R (arginine). In various embodiments, the TadA-derived cytidine deaminase comprises an alteration at one or more of positions 26, 27, 28, 48, 73, or 96 compared to SEQ ID NO: 489.

[0237] As will be appreciated by those of skill in the art, TadA-derived cytidine deaminases (e.g., TadA-CD) may comprise a plurality of mutations relative to the parent adenosine deaminase (e.g., TadA-8e). In some embodiments, the deaminase of the instant application (e.g., TadA-CD) comprises mutations at residues E27, V28, and H96. In some embodiments, the disclosed deaminase further comprises at least one mutation at a residue selected from R26, M61, Y73, I76, M151, Q154, and A158, in the amino acid sequence of SEQ ID NO: 489, or corresponding mutations in a homologous adenosine deaminase.

[0238] In some embodiments, the deaminase comprises at least one mutation selected from E27A, E27K, V28G, V28A, and 1-196N, and further comprises at least one mutation at a residue selected from R26G, M611, Y731H, Y73S, Y73C, 176F, M151I, Q154R., Q154H, and A158S, in the amino acid sequence of SEQ ID NO: 489, or a corresponding mutation in a homologous adenosine deaminase. Other mutations are also possible. For example, in certain embodiments, the TadA-CD enzyme comprises mutations selected from E27A, V28C, and H96N, and further comprises at least one mutation selected from R26G, M61I, Y73H, Y73S, Y73C, 176F, M151I, Q154R, Q1541-1, and Al 58S, in the amino acid sequence of SEQ ID NO: 489, or corresponding mutations in a homologous adenosine deaminase.

[0239] Other exemplary embodiments may include (1) deaminases comprising mutations E27K, V28G, and H96N, and further comprising at least one mutation selected from R26G, M61I, Y73H, Y73S, Y73C, 176F, M151I, Q154R, Q1 54H, and A158S, in the amino acid sequence of SEQ ID NO: 489 or corresponding mutations in a homologous adenosine deaminase; (2) deaminases comprising mutations E27A, V28A, and H96N, and further comprising at least one mutation selected from R26G3, M611, Y73H, Y73S, Y73C, I76F, M151I, Q154R, Q154H, and A158S, in the amino acid sequence of SEQ ID NO: 489, or corresponding mutations in a homologous adenosine deaminase; (3) deaminases comprising mutations E27K, V28A., and H96N, and further comprising at least one mutation selected from R26G, M61I, Y73H, Y73S, Y73C, 176F, M1511, Q154R, Q1541-1, and A158S, in the amino acid sequence of SEQ ID NO: 489, or corresponding mutations in a homologous adenosine deaminase.

[0240] In some embodiments, the TadA-derived cytidine deaminases (TadA-CD) comprise at least two mutations at residues selected from R26, M61, Y73, 176, M151, Q154, and A158 (relative to a reference adenosine deaminase). In other embodiments, the TadA-CD comprises at least two mutations at residues selected from R26G, M61I, Y73H, 176F, M151I, Q154H, Q154R, and A158S.

[0241] In some embodiments, the addition of a V106W mutation improves the selectivity by suppressing A deamination to a greater extent than C deamination.

[0242] In some embodiments, a TadA-based dual editor comprises an adenosine deaminase variant comprising one, two, three, four, or five mutations selected from R26G, V28A, A48R, Y73S, and H96N (e.g., SEQ ID NO: 495).

[0243] As such, in some embodiments, provided herein are deaminases that comprise mutations at residues R26, V28, A48, and. Y73 in the amino acid sequence of SEQ ID NO: 489, or corresponding mutations in a homologous adenosine deaminase. Further provided herein are deaminases that comprise mutations at residues R26, E27, V28, A48, and Y73 (e.g., further comprise a mutation at E27) in the amino acid sequence of SEQ ID NO: 489. In particular embodiments, these deaminases comprise the mutations R26G, V28A, A48R, Y73S, and H96N. In some embodiments, these deaminases comprise the mutations R26G, V28GE, A48R, and Y73C.

[0244] TadA-CD variants may comprise at least one mutation selected from R26G, E27A, V28G, 176F, H96N, and M1511 (e.g., TadA-CDa, SEQ ID NO: 490); R26G, E27A, V28G, 176F, H96N, and A158S (e.g., TadA-CDb, SEQ ID NO: 491); R26G, E27A, V28G, I76F, H96N, Q154R, and A158S (e.g., TadA-CDc, SEQ ID NO: 492); E27A, V28G, Y731-H, -196N, Q154H, and A158S (e.g., TadA-CDd, SEQ ID NO: 493); R26G, V28A, A48R, Y73S, and 1H96N (e.g., TadA-CDe, SEQ ID NO. 494); V28A, A48R, and Y73S (e.g., TadA-CDf, SEQ ID NO: 495), and R26G, V28G, A48R, and Y73C (e.g., TadA-CDg, SEQ ID NO: 496).

[0245] In some preferred embodiments, the deaminase comprises the mutations R26G, E27A, V28G, 176F, H96N, and A158S (e.g., TadA-CDa., SEQ ID NO: 490), R26G, E27A, V28G, 176F, H96N, Q154R, and A158S (e.g., TadA-CDb, SEQ ID NO: 491), R26G, E27A, V28G, 176F, I-196N, and M151I (e.g.. TadA-CDc. SEQ ID NO: 492), E27K, V28A, M611, and I96N (e.g., TadA-CDd, SEQ ID NO: 493), E27A. V28G, Y73H, H96N, Q154H, and A158S (e.g., TadA-CDe, SEQ ID NO 494), R26G, V28A, A48R., Y73S, and H96N (e.g., TadA-CDf, SEQ ID NO: 495), and R26G, V28G, A48R, and Y73C (e.g., TadA-CDg, SEQ ID NO: 496).

[0246] In some embodiments, the TadA-CD variants described above and herein may also comprises a V106W mutation.

[0247] In some embodiments, the TadA-CD variants comprise at least 80%, at least 85%, at least 90%, at least 95%, at least 98%, at least 99%, or at least 99.5% to any of the amino acid sequences of SEQ ID NOs: 489-496.

[0248] In some embodiments, the evolved. TadA-Dual deaminase comprises the mutations R26G, V28A, N46I, A48R, Y73P, and H96N (TadA-CD-1, SEQ ID NO: 497) relative to the amino acid sequence of SEQ ID NO: 489. In some embodiments, the evolved TadA-Dual deaminase comprises the mutations R26G, V28A. N46T, A48R, Y73P, and H96N (TadA-CD-2, SEQ ID NO: 498) relative to the amino acid sequence of SEQ ID NO: 489. In some embodiments, the evolved TadA-Dual deaminase comprises the mutations R-26G, V28A, N46T, A48R, Y73S, and H96N (TadA-CD-3, SEQ ID NO: 499) relative to the amino acid sequence of SEQ ID NO. 189. In some embodiments, the evolved TadA-Dual deaminase comprises the mutations R26G, V28A, N46V, A48R, Y73S, and H96N (TadA-CD-4, SEQ ID NO:500) relative to the amino acid sequence of SEQ ID NO: 489. In some embodiments, the evolved TadA-Dual deaminase comprises the mutations R26G, V28A, N46V, A48R, Y73P, and H96N (TadA-CD-5, SEQ ID NO: 501) relative to the amino acid sequence of SEQ ID NO: 489. In some embodiments, the evolved TadA-Dual deaminase comprises the mutations R26G, V28A. N46L. A48R Y73P, and H96N (TadA-CD-6, SEQ ID NO: 502) relative to the amino acid sequence of SEQ ID NO: 489. In some embodiments, the evolved TadA-Dual deaminase comprises the mutations V28A, N46L, A48P, and Y73P (TadA-CD-7, SEQ ID NO: 503) relative to the amino acid sequence of SEQ ID NO: 489. In some embodiments, the evolved TadA-Dual deaminase comprises the mutations V28A, N46C, A48P, and Y73P (TadA-CD-8, SEQ ID NO: 504) relative to the amino acid sequence of SEQ ID NO: 489. In some embodiments, the evolved TadA-Dual deaminase comprises the mutations R26G, V28A, N46V, A48R, Y73P, and H96N (TadA-CD-9, SEQ ID NO: 505) relative to the amino acid sequence of SEQ ID NO: 489. In some embodiments, the evolved TadA-Dual deaminase comprises the mutations R26G, V28A, N46V. A48R. Q71H, Y73P, and H96N (TadA-CD-10, SEQ ID NO: 506) relative to the amino acid sequence of SEQ ID NO: 489. In some embodiments, the evolved TadA-Dual deaminase comprises the mutations R26G, V28A, N46L, A48R, Y73P, and H96N (TadA-CD-11, SEQ ID NO: 507) relative to the amino acid sequence of SEQ ID NO: 489. In some embodiments, the evolved TadA-Dual deaminase comprises the mutations R26G, V28A. N46C, A48R, Y73P, and H96N (TadA-CD-12, SEQ ID NO: 508) relative to the amino acid sequence of SEQ ID NO: 489. In some embodiments, the evolved TadA-Dual deaminase comprises the mutations R26G, V28A, N46C, A48R, Y73P. H96N, and A162V (TadA-CD-13, SEQ ID NO: 509) relative to the amino acid sequence of SEQ ID NO: 489.

[0249] In some embodiments, the evolved TadA-Dual deaminase comprises the mutations R26G, V28A, N46I, A48R, Y73S, and H96N (TadA-CD-14, SEQ ID NO: 510) relative to the amino acid sequence of SEQ ID NO: 489. In some embodiments, the evolved TadA-Dual deaminase comprises the mutations R26G, V28A, A48R, Q71S, Y73S, and H96N (TadA-CD-15, SEQ ID NO: 511) relative to the amino acid sequence of SEQ ID NO: 489. In some embodiments, the evolved TadA-Dual deaminase comprises the mutations R26G, V28A, N46L, A48R, and Y73P (TadA-CD-16, SEQ ID NO: 512) relative to the amino acid sequence of SEQ ID NO: 489. In some embodiments, the evolved TadA-Dual deaminase comprises the mutations R26G, V28A, N46L, A48R, Y73P, and H96N (TadA-CD-17, SEQ ID NO: 513) relative to the amino acid sequence of SEQ ID NO: 489. In some embodiments, the evolved TadA-Dual deaminase comprises the mutations R26G, V28A, Y73P, and H96N (TadA-CD-18, SEQ ID NO: 514) relative to the amino acid sequence of SEQ ID NO: 489. In some embodiments, the evolved TadA-Dual deaminase comprises the mutations R26G. V28A, N46V, A48R, Y73S, and H96N (TadA-CD-19, SEQ ID NO: 515) relative to the amino acid sequence of SEQ ID NO: 489. In some embodiments, the evolved TadA-Dual deaminase comprises the mutations R26G, V28A, N46V, A48R, Y73P. and H96N (TadA-CD-20. SEQ ID NO: 516) relative to the amino acid sequence of SEQ ID NO: 489. In some embodiments, the evolved TadA-Dual deaminase comprises the mutations R26G and N46L (TadA-CD-21. SEQ ID NO: 517) relative to the amino acid sequence of SEQ ID NO: 489. In some embodiments, the evolved TadA-Dual deaminase comprises the mutations R26G, V28A, N46I, A48R, Y73P, and H96N (TadA-CD-22, SEQ ID NO: 518) relative to the amino acid sequence of SEQ ID NO: 489. In some embodiments, the 10 evolved TadA-Dual deaminase comprises the mutations R26G, V28A, N46V. A48R, Y73P, and H96N (TadA-CD-23, SEQ ID NO: 519) relative to the amino acid sequence of SEQ ID NO: 489. In some embodiments, the evolved TadA-Dual deaminase comprises the mutations R26G, V28A, A48P, Y73H, T79P, and H96N (TadA-CD-24, SEQ ID NO: 520) relative to the amino acid sequence of SEQ ID NO: 489. In some embodiments, the evolved TadA-Dual deaminase comprises the mutations R26G, N46I, and H96N (TadA-CD-25, SEQ ID NO: 521) relative to the amino acid sequence of SEQ ID NO: 489.

[0250] In some embodiments, the evolved TadA-Dual deaminase comprises the mutations R26G, V28A, N46V. A48R. Y73P, and H % N (TadA-CD-26, SEQ ID NO: 522) relative to the amino acid sequence of SEQ ID NO: 489. In some embodiments, the evolved TadA-Dual deaminase comprises the mutations R26G, V28A, N46L, A48R, Y73S, and H96N (TadA-CD-27, SEQ ID NO: 523) relative to the amino acid sequence of SEQ ID NO: 489. In some embodiments, the evolved TadA-Dual deaminase comprises the mutations R26G, V28A, N46C, A48R, H96N, and A162V (TadA-CD-28, SEQ ID NO: 524) relative to the amino acid sequence of SEQ ID NO: 489. In some embodiments, the evolved TadA-Dual deaminase comprises the mutations R26G. V28A, N46V, A48R, Q71H, Y73P, and H96N (TadA-CD-29, SEQ ID NO: 525) relative to the amino acid sequence of SEQ ID NO: 489. In some embodiments, the evolved TadA-Dual deaminase comprises the mutations R26G, V28A, N46C, A48R, Y73P, and H96N (TadA-CD-30. SEQ ID NO: 526) relative to the amino acid sequence of SEQ ID NO: 489. In some embodiments, the evolved TadA-Dual deaminase comprises the mutations R26G, V28A, N46C, A48R, Y73P, H96N, and A162V (TadA-CD-31, SEQ ID NO: 527) relative to the amino acid sequence of SEQ ID NO: 489.

[0251] In some embodiments, the evolved TadA-Dual deaminase comprises the mutations R26G, V28A, N46V. A48R. Y73P, and H % N (TadA-CD-32, SEQ ID NO: 528) relative to the amino acid sequence of SEQ ID NO: 489. In some embodiments, the evolved TadA-Dual deaminase comprises the mutations R26G, V28A. N46V, A48R, Y73S, and H96N (TadA-CD-33, SEQ ID NO: 529) relative to the amino acid sequence of SEQ ID NO: 489. In some embodiments, the evolved TadA-Dual deaminase comprises the mutations R26G, V28A. N46V, A48P, Y73S. and H96N (TadA-CD-34. SEQ ID NO: 530) relative to the amino acid sequence of SEQ ID NO: 489. In some embodiments, the evolved TadA-Dual deaminase comprises the mutations R26G, V28A, N46C, A48R, Y73P, and H96N (TadA-CD-35, SEQ ID NO: 531) relative to the amino acid sequence of SEQ ID NO: 489. In some embodiments, the evolved TadA-Dual deaminase comprises the mutations R26G, V28A, L34M, N46L, A48R, Y73P, and H96N (TadA-CD-36, SEQ ID NO: 532) relative to the amino acid sequence of SEQ ID NO: 489. In some embodiments, the evolved TadA-Dual deaminase comprises the mutations R26G. V28A, N46L, A48R, Y73P, and H96N (TadA-CD-37, SEQ ID NO: 533) relative to the amino acid sequence of SEQ ID NO: 489. In some embodiments, the evolved TadA-Dual deaminase comprises the mutations R26G, V28A, N46L, A48P, R64K, Y73P, and H96N (TadA-CD-38, SEQ ID NO: 534) relative to the amino acid sequence of SEQ ID NO; 489.

[0252] In some embodiments, the evolved TadA-Dual deaminase comprises the mutations N46I, S73P, and H154Q (TadA-CD-1, SEQ ID NO: 497) relative to the amino acid sequence of SEQ ID NO: 495. In some embodiments, the evolved TadA-Dual deaminase comprises the mutations N46T (TadA-CD-2, SEQ ID NO: 498) relative to the amino acid sequence of SEQ ID NO: 495. In some embodiments, the evolved TadA-Dual deaminase comprises the mutations N46T and H154Q (TadA-CD-3, SEQ ID NO: 499) relative to the amino acid sequence of SEQ ID NO: 495. In some embodiments, the evolved TadA-Dual deaminase comprises the mutations N46V and H154Q (TadA-CD-4, SEQ ID NO: 500) relative to the amino acid sequence of SEQ ID NO: 495. In some embodiments, the evolved TadA-Dual deaminase comprises the mutations N46V, S73P, G105S, and H154Q (TadA-CD-5, SEQ ID NO: 501) relative to the amino acid sequence of SEQ ID NO: 495. In some embodiments, the evolved TadA-Dual deaminase comprises the mutations N46L, S73P, and H154Q (TadA-CD-6, SEQ ID NO: 502) relative to the amino acid sequence of SEQ ID NO: 495. In some embodiments, the evolved TadA-Dual deaminase comprises the mutations G26R N46L, R48P, S73P, N96H, and H154Q (TadA-CD-7, SEQ ID NO: 503) relative to the amino acid sequence of SEQ ID NO: 495. In some embodiments, the evolved TadA-Dual deaminase comprises the mutations N46C, N % H, and H154Q (TadA-CD-8, SEQ ID NO: 504) relative to the amino acid sequence of SEQ ID NO: 495. In some embodiments, the evolved TadA-Dual deaminase comprises the mutations N46V, S73P, and H154Q (TadA-CD-9, SEQ ID NO: 505) relative to the amino acid sequence of SEQ ID NO: 495. In some embodiments, the evolved TadA-Dual deaminase comprises the mutations N46V, Q71H, S73P, and H154Q (TadA-CD-10, SEQ ID NO: 506) relative to the amino acid sequence of SEQ ID NO: 495. In some embodiments, the evolved TadA-Dual deaminase comprises the mutations N46L and H154Q (TadA-CD-11. SEQ ID NO: 507) relative to the amino acid sequence of SEQ ID NO: 495. In some embodiments, the evolved TadA-Dual deaminase comprises the mutations N46C, S73P, and H154Q (TadA-CD-12, SEQ ID NO: 508) relative to the amino acid sequence of SEQ ID NO: 495. In some embodiments, the evolved TadA-Dual deaminase comprises the mutations N46C, S73P. H154Q, and A162V (TadA-CD-13, SEQ ID NO: 509) relative to the amino acid sequence of SEQ ID NO: 495.

[0253] In some embodiments, the evolved TadA-Dual deaminase comprises the mutations N46I and H154Q (TadA-CD-14, SEQ ID NO: 510) relative to the amino acid sequence of SEQ ID NO: 495. In some embodiments, the evolved TadA-Dual deaminase comprises the mutations Q7IS and H154Q (TadA-CD-15, SEQ ID NO: 511) relative to the amino acid sequence of SEQ ID NO: 489. In some embodiments, the evolved TadA-Dual deaminase comprises the mutations N46L, S73P, N79T, and N96H (TadA-CD-16, SEQ ID NO; 512) relative to the amino acid sequence of SEQ ID NO: 495. In some embodiments, the evolved TadA-Dual deaminase comprises the mutations N46L, S73P, N79T (TadA-CD-17. SEQ ID NO: 513) relative to the amino acid sequence of SEQ ID NO: 495. In some embodiments, the evolved TadA-Dual deaminase comprises the mutations R48A, S73P, and N79T (TadA-CD-18. SEQ ID NO: 514) relative to the amino acid sequence of SEQ ID NO: 495. In some embodiments, the evolved TadA-Dual deaminase comprises the mutations N46V and N79T (TadA-CD-19. SEQ ID NO: 515) relative to the amino acid sequence of SEQ ID NO: 495. In some embodiments, the evolved TadA-Dual deaminase comprises the mutations N46V, S73P, and N79T (TadA-CD-20, SEQ ID NO: 516) relative to the amino acid sequence of SEQ ID NO: 495. In some embodiments, the evolved TadA-Dual deaminase comprises the mutations A28V, N46L, R48A, S73Y, N79T, and N96H (TadA-CD-21, SEQ ID NO: 517) relative to the amino acid sequence of SEQ ID NO: 495. In some embodiments, the evolved TadA-Dual deaminase comprises the mutations N46I, S73P, and N79T (TadA-CD-22, SEQ ID NO: 518) relative to the amino acid sequence of SEQ ID NO: 495. In some embodiments, the evolved TadA-Dual deaminase comprises the mutations N46V, S73P, N79T, and G106S (TadA-CD-23, SEQ ID NO: 519) relative to the amino acid sequence of SEQ ID NO: 495. In some embodiments, the evolved TadA-Dual deaminase comprises the mutations R48P, S73H, and N79P (TadA-CD-24, SEQ ID NO: 520) relative to the amino acid sequence of SEQ ID NO: 495. In some embodiments, the evolved TadA-Dual deaminase comprises the mutations A28V, N46I, R48A, S73Y, and N79T (TadA-CD-25. SEQ ID NO: 521) relative to the amino acid sequence of SEQ ID NO: 495.

[0254] In some embodiments, the evolved TadA-Dual deaminase comprises the mutations N46V and S73P (TadA-CD-26, SEQ ID NO: 522) relative to the amino acid sequence of SEQ ID NO: 495. In some embodiments, the evolved TadA-Dual deaminase comprises the mutation N46L (TadA-CD-27, SEQ ID NO: 523) relative to the amino acid sequence of SEQ ID NO: 495. In some embodiments, the evolved TadA-Dual deaminase comprises the mutations N46C, S73Y, and A162V (TadA-CD-28, SEQ ID NO: 524) relative to the amino acid sequence of SEQ ID NO: 495. In some embodiments, the evolved TadA-Dual deaminase comprises the mutations N46V, Q71H, and S73P (TadA-CD-29, SEQ ID NO; 525) relative to the amino acid sequence of SEQ ID NO: 495. In some embodiments, the evolved TadA-Dual deaminase comprises the mutations N46C and S73P (TadA-CD-30, SEQ ID NO: 526) relative to the amino acid sequence of SEQ ID NO: 495. In some embodiments, the evolved TadA-Dual deaminase comprises the mutations N46C, S73P, and A162V (TadA-CD-31, SEQ ID NO: 527) relative to the amino acid sequence of SEQ ID NO: 495. In some embodiments, the evolved TadA-Dual deaminase comprises the mutations N46V and S73P (TadA-CD-32, SEQ ID NO: 528) relative to the amino acid sequence of SEQ ID NO: 495. In some embodiments, the evolved TadA-Dual deaminase comprises the mutation N46V (TadA-CD-33, SEQ ID NO: 529) relative to the amino acid sequence of SEQ ID NO: 495. In some embodiments, the evolved TadA-Dual deaminase comprises the mutations N46V and R48P(TadA-CD-34, SEQ ID NO: 530) relative to the amino acid sequence of SEQ ID NO: 495. In some embodiments, the evolved TadA-Dual deaminase comprises the mutations N46CV and S73P (TadA-CD-35, SEQ ID NO: 531) relative to the amino acid sequence of SEQ ID NO: 495. In some embodiments, the evolved TadA-Dual deaminase comprises the mutations L34M, N46L and S73P (TadA-CD-36, SEQ ID NO: 532) relative to the amino acid sequence of SEQ ID NO: 495. In some embodiments, the evolved TadA-Dual deaminase comprises the mutations N46L and S73P (TadA-CD-37, SEQ ID NO: 533) relative to the amino acid sequence of SEQ ID NO: 495. In some embodiments, the evolved TadA-Dual deaminase comprises the mutations N46L, r48P, R64K and S73P (TadA-CD-38, SEQ ID NO: 534) relative to the amino acid sequence of SEQ ID NO: 495.

[0255] In some embodiments, the TadA-CDs evolved from TadA-dual comprise at least 80%, 85%, 90%, 95%. 98%, 99%, or 99.5% identical to any of the amino acid sequences of SEQ ID NOs: 39, 41-54, and 359-383.

[0256] Exemplary TadA-derived cytosine base editor amino acid sequences include: TadA-CDa base editor (SpCas9n napDNAbp domain) (TadCBEa) (SEQ ID NO: 535), TadA-CDb base editor (SpCas9n napDNAbp domain) (TadCBEb) (SEQ ID NO: 536), TadA-CDc base editor (SpCas9n napDNAbp domain) (TadCBEc) (SEQ ID NO: 537), TadA-CDd base editor (SpCas9n napDNAbp domain) (TadCBEd) (SEQ ID NO: 538), TadA-CDe base editor (SpCas9n napDNAbp domain) (TadCBEe) (SEQ ID NO: 539), TadA-CDa(V106W) base editor (SpCas9n napDNAbp domain) (TadCBEa(V106W)) (SEQ ID NO: 540), TadA-CDd(V106W) base editor (SpCas9n napDNAbp domain) (TadCBEd(V106W)) (SEQ ID NO: 541), TadA-CDf base editor (SpCas9n napDNAbp domain) (TadCBEf) (SEQ ID NO: 542), TadA-CDg base editor (SpCas9n napDNAbp domain) (TadCBEg) (SEQ ID NO: 543), TadA-CDa:eNme2Cas9 base editor (SEQ ID NO: 544), TadA-CDa:SaCas9 base editor (SEQ ID NO: 545), TadA-CDa:SpCas9-NG base editor (SEQ ID NO: 546), TadA-CDa:enCjCas9 base editor (SEQ ID NO: 547).

[0257] Exemplary polynucleotides encoding TadA-derived cytosine base editors of the disclosure include: TadCBEa-eNme2-C-BE4max vector (SEQ ID NO: 548), TadCBEa-enCjCas9-BE4max vector (SEQ ID NO: 549), TadCBEa-SpCas9-BE4max vector (SEQ ID NO: 550). TadCBEa-SaCas9-BE4max vector (SEQ ID NO: 551), TadCBEa-SpCas9-NG-BE4max vector (SEQ ID NO: 552).

### Guide Polynucleotides

[0258] A polynucleotide programmable nucleotide binding domain, when in conjunction with a bound guide polynucleotide (e.g., gRNA), can specifically bind to a target polynucleotide sequence (i.e., via complementary base pairing between bases of the bound guide nucleic acid and bases of the target polynucleotide sequence) and thereby localize the base editor to the target nucleic acid sequence desired to be edited. In some embodiments, the target polynucleotide sequence comprises single-stranded DNA or double-stranded DNA. In some embodiments, the target polynucleotide sequence comprises RNA. In some embodiments, the target polynucleotide sequence comprises a DNA-RNA hybrid.

[0259] In an embodiment, a guide polynucleotide described herein can be RNA or DNA. In one embodiment, the guide polynucleotide is a gRNA.

[0260] In some embodiments, the guide polynucleotide is at least one single guide RNA (“sgRNA” or “gRNA”). In some embodiments, a guide polynucleotide comprises two or more individual polynucleotides, which can interact with one another via for example complementary base pairing (e.g., a dual guide polynucleotide, dual gRNA). For example, a guide polynucleotide can comprise a CRISPR RNA (crRNA) and a trans-activating CRISPR RNA (tracrRNA) or can comprise one or more trans-activating CRISPR RNA (tracrRNA).

[0261] A guide polynucleotide may include natural or non-natural (or unnatural) nucleotides (e.g., peptide nucleic acid or nucleotide analogs). In some cases, the targeting region of a guide nucleic acid sequence (e.g., a spacer) can be at least 15, 16, 17, 18, 19, 20, 21, 22, 23, 24, 25, 26, 27, 28, 29, or 30 nucleotides in length.

[0262] In some embodiments, the methods described herein can utilize an engineered Cas protein. A guide RNA (gRNA) is a short synthetic RNA composed of a scaffold sequence necessary for Cas-binding and a user-defined ˜20 nucleotide spacer that defines the genomic target to be modified. Exemplary gRNA scaffold sequences are provided in the sequence listing as SEQ ID NOs: 317-327 and 425. Thus, a skilled artisan can change the genomic target of the Cas protein specificity is partially determined by how specific the gRNA targeting sequence is for the genomic target compared to the rest of the genome. In embodiments, the spacer is about 10, 11, 12, 13, 14, 15, 16, 17, 18, 19, 20, 22, 23, 24, 25, or more nucleotides in length. The spacer of a gRNA can be or can be about 19, 20, or 21 nucleotides in length.

[0263] A gRNA or a guide polynucleotide can target any exon or intron of a gene target. In some embodiments, a composition comprises multiple gRNAs that all target the same exon or multiple gRNAs that target different exons. An exon and/or an intron of a gene can be targeted. A gRNA or a guide polynucleotide can target a nucleic acid sequence of about 20 nucleotides or less than about 20 nucleotides (e.g., at least about 5, 10, 15, 16, 17, 18, 19, 20, 21, 22, 23, 24, 25, 30 nucleotides), or anywhere between about 1-100 nucleotides (e.g., 5, 10, 15, 16, 17, 18, 19, 20, 21, 22, 23, 24, 25, 30, 40, 50, 60, 70, 80, 90, 100). A target nucleic acid sequence can be or can be about 20 bases immediately 5′ of the first nucleotide of the PAM. A gRNA can target a nucleic acid sequence. A target nucleic acid can be at least or at least about 1-10, 1-20, 1-30, 1-40, 1-50, 1-60, 1-70, 1-80, 1-90, or 1-100 nucleotides.

[0264] The guide polynucleotides can comprise standard ribonucleotides, modified ribonucleotides (e.g., pseudouridine), ribonucleotide isomers, and/or ribonucleotide analogs.

[0265] In some embodiments, a base editor system may comprise multiple guide polynucleotides, e.g., gRNAs. For example, the gRNAs may target to one or more target loci (e.g., at least 1 gRNA, at least 2 gRNA, at least 5 gRNA, at least 10 gRNA, at least 20 gRNA, at least 30 g RNA, at least 50 gRNA) comprised in a base editor system. The multiple gRNA sequences can be tandemly arranged and may be separated by a direct repeat.

### Modified Polynucleotides

[0266] To enhance expression, stability, and/or genomic/base editing efficiency, and/or reduce possible toxicity, the base editor-coding sequence (e.g., mRNA) and/or the guide polynucleotide (e.g., gRNA) can be modified to include one or more modified nucleotides and/or chemical modifications, e.g. using pseudo-uridine, 5-Methyl-cytosine, 2′-O-methyl-3′-phosphonoacetate, 2′-O-methyl thioPACE (MSP), 2′-O-methyl-PACE (MP), 2′-fluoro RNA (2′-F-RNA), =constrained ethyl (S-cEt), 2′-O-methyl (‘M’), 2′-O-methyl-3′-phosphorothioate (‘MS’), 2′-O-methyl-3′-thiophosphonoacetate (‘MSP’), 5-methoxyuridine, phosphorothioate, and N1-Methylpseudouridine. Chemically protected gRNAs can enhance stability and editing efficiency in vivo and ex vivo. Methods for using chemically modified mRNAs and guide RNAs are known in the art and described, for example, by Jiang et al., Chemical modifications of adenine base editor mRNA and guide RNA expand its application scope. Nat Commun 11, 1979 (2020). doi.org/10.1038/s41467-020-15892-8, Callum et al., Ni-Methylpseudouridine substitution enhances the performance of synthetic mRNA switches in cells, Nucleic Acids Research, Volume 48, Issue 6, 6 Apr. 2020, Page e35, and Andries et al., Journal of Controlled Release, Volume 217, 10 Nov. 2015, Pages 337-344, each of which is incorporated herein by reference in its entirety.

[0267] In some embodiments, the guide polynucleotide comprises one or more modified nucleotides at the 5′ end and/or the 3′ end of the guide. In some embodiments, the guide polynucleotide comprises two, three, four or more modified nucleosides at the 5′ end and/or the 3′ end of the guide. In some embodiments, the guide polynucleotide comprises two, three, four or more modified nucleosides at the 5′ end and/or the 3′ end of the guide.

[0268] In some embodiments, the guide comprises at least about 50%-75% modified nucleotides. In some embodiments, the guide comprises at least about 85% or more modified nucleotides. In some embodiments, at least about 1-5 nucleotides at the 5′ end of the gRNA are modified and at least about 1-5 nucleotides at the 3′ end of the gRNA are modified. In some embodiments, at least about 3-5 contiguous nucleotides at each of the 5′ and 3′ termini of the gRNA are modified. In some embodiments, at least about 20% of the nucleotides present in a direct repeat or anti-direct repeat are modified. In some embodiments, at least about 50% of the nucleotides present in a direct repeat or anti-direct repeat are modified. In some embodiments, at least about 50-75% of the nucleotides present in a direct repeat or anti-direct repeat are modified. In some embodiments, at least about 100 of the nucleotides present in a direct repeat or anti-direct repeat are modified. In some embodiments, at least about 20% or more of the nucleotides present in a hairpin present in the gRNA scaffold are modified. In some embodiments, at least about 50% or more of the nucleotides present in a hairpin present in the gRNA scaffold are modified. In some embodiments, the guide comprises a variable length spacer. In some embodiments, the guide comprises a 20-40 nucleotide spacer. In some embodiments, the guide comprises a spacer comprising at least about 20-25 nucleotides or at least about 30-35 nucleotides. In some embodiments, the spacer comprises modified nucleotides. In some embodiments, the guide comprises two or more of the following:
[0269] at least about 1-5 nucleotides at the 5′ end of the gRNA are modified and at least about 1-5 nucleotides at the 3′ end of the gRNA are modified;
[0270] at least about 20% of the nucleotides present in a direct repeat or anti-direct repeat are modified;
[0271] at least about 50-75% of the nucleotides present in a direct repeat or anti-direct repeat are modified;
[0272] at least about 20% or more of the nucleotides present in a hairpin present in the gRNA scaffold are modified;
[0273] a variable length spacer; and
[0274] a spacer comprising modified nucleotides.

[0275] In embodiments, the gRNA contains numerous modified nucleotides and/or chemical modifications. Such modifications can increase base editing ˜2 fold in vivo or in vitro. In embodiments, the gRNA comprises 2′-O-methyl or phosphorothioate modifications. In an embodiment, the gRNA comprises 2′-O-methyl and phosphorothioate modifications. In an embodiment, the modifications increase base editing by at least about 2 fold.

[0276] A guide polynucleotide can comprise one or more modifications to provide a nucleic acid with a new or enhanced feature. A guide polynucleotide can comprise a nucleic acid affinity tag.

[0277] A guide polynucleotide can comprise synthetic nucleotide, synthetic nucleotide analog, nucleotide derivatives, and/or modified nucleotides.

[0278] A gRNA or a guide polynucleotide can also be modified by 5′ adenylate, 5′ guanosine-triphosphate cap, 5′ N7-Methylguanosine-triphosphate cap, 5′ triphosphate cap, 3′ phosphate, 3′ thiophosphate, 5′ phosphate, 5′ thiophosphate, Cis-Syn thymidine dimer, trimers, C₁₂ spacer, C₃ spacer, C₆ spacer, dSpacer, PC spacer, rSpacer, Spacer 18, Spacer 9, 3′-3′ modifications, 2′-O-methyl thioPACE (MSP), 2′-O-methyl-PACE (MP), and constrained ethyl (S-cEt), 5′-5′ modifications, abasic, acridine, azobenzene, biotin, biotin BB, biotin TEG, cholesteryl TEG, desthiobiotin TEG, DNP TEG, DNP-X, DOTA, dT-Biotin, dual biotin, PC biotin, psoralen C2, psoralen C6, TINA, 3′ DABCYL, black hole quencher 1, black hole quencher 2, DABCYL SE, dT-DABCYL, IRDye QC-1, QSY-21, QSY-35, QSY-7, QSY-9, carboxyl linker, thiol linkers, 2′-deoxyribonucleoside analog purine, 2′-deoxyribonucleoside analog pyrimidine, ribonucleoside analog, 2′-O-methyl ribonucleoside analog, sugar modified analogs, wobble/universal bases, fluorescent dye label, 2′-fluoro RNA, 2′-O-methyl RNA, methylphosphonate, phosphodiester DNA, phosphodiester RNA, phosphothioate DNA, phosphorothioate RNA, UNA, pseudouridine-5′-triphosphate, 5′-methylcytidine-5′-triphosphate, or any combination thereof.

[0279] In some cases, a phosphorothioate enhanced RNA gRNA can inhibit RNase A, RNase T1, calf serum nucleases, or any combinations thereof. These properties can allow the use of PS-RNA gRNAs to be used in applications where exposure to nucleases is of high probability in vivo or in vitro. For example, phosphorothioate (PS) bonds can be introduced between the last 3-5 nucleotides at the 5′- or 3′-end of a gRNA which can inhibit exonuclease degradation. In some cases, phosphorothioate bonds can be added throughout an entire gRNA to reduce attack by endonucleases.

### Fusion Proteins or Complexes Comprising a Nuclear Localization Sequence (NLS)

[0280] In some embodiments, the fusion proteins or complexes provided herein further comprise one or more (e.g., 2, 3, 4, 5) nuclear targeting sequences, for example a nuclear localization sequence (NLS). In one embodiment, a bipartite NLS is used. In some embodiments, a NLS comprises an amino acid sequence that facilitates the importation of a protein, that comprises an NLS, into the cell nucleus (e.g., by nuclear transport). In some embodiments, the NLS is fused to the N-terminus or the C-terminus of the fusion protein. In some embodiments, the NLS is fused to the C-terminus or N-terminus of an nCas9 domain or a dCas9 domain. In some embodiments, the NLS is fused to the N-terminus or C-terminus of the Cas12 domain. In some embodiments, the NLS is fused to the N-terminus or C-terminus of the cytidine or adenosine deaminase. In some embodiments, the NLS is fused to the fusion protein via one or more linkers. In some embodiments, the NLS is fused to the fusion protein without a linker. In some embodiments, the NLS comprises an amino acid sequence of any one of the NLS sequences provided or referenced herein. Additional nuclear localization sequences are known in the art and would be apparent to the skilled artisan. For example, NLS sequences are described in Plank et al., PCT/EP2000/011690, the contents of which are incorporated herein by reference for their disclosure of exemplary nuclear localization sequences.

[0281] In some embodiments, the NLS is present in a linker or the NLS is flanked by linkers, for example described herein. A bipartite NLS comprises two basic amino acid clusters, which are separated by a relatively short spacer sequence (hence bipartite—2 parts, while monopartite NLSs are not). The NLS of nucleoplasmin, KR [PAATKKAGQA]KKKK (SEQ ID NO: 191), is the prototype of the ubiquitous bipartite signal: two clusters of basic amino acids, separated by a spacer of about 10 amino acids. The sequence of an exemplary bipartite NLS follows: PKKKRKVEGADKRTADGSEFESPKKKRKV (SEQ ID NO: 328).

[0282] In some embodiments, any of the fusion proteins or complexes provided herein comprise an NLS comprising the amino acid sequence EGADKRTADGSEFESPKKKRKV (amino acids 8 to 29 of SEQ ID NO 328). In some embodiments, any of the adenosine base editors provided herein comprise an NLS comprising the amino acid sequence EGADKRTADGSEFESPKKKRKV (amino acids 8 to 29 of SEQ ID NO: 328). In some embodiments, the NLS is at a C-terminal portion of the adenosine base editor. In some embodiments, the NLS is at the C-terminus of the adenosine base editor.

### Additional Domains

[0283] A base editor described herein can include any domain which helps to facilitate the nucleobase editing, modification or altering of a nucleobase of a polynucleotide. In some embodiments, a base editor comprises a polynucleotide programmable nucleotide binding domain (e.g., Cas9), a nucleobase editing domain (e.g., deaminase domain), and one or more additional domains. In some embodiments, the additional domain can facilitate enzymatic or catalytic functions of the base editor, binding functions of the base editor, or be inhibitors of cellular machinery (e.g., enzymes) that could interfere with the desired base editing result. In some embodiments, a base editor comprises a nuclease, a nickase, a recombinase, a deaminase, a methyltransferase, a methylase, an acetylase, an acetyltransferase, a transcriptional activator, or a transcriptional repressor domain.

[0284] In some embodiments, a base editor comprises an uracil glycosylase inhibitor (UGI) domain. In some cases, a base editor is expressed in a cell in trans with a UGI polypeptide. In some embodiments, cellular DNA repair response to the presence of U: G heteroduplex DNA can be responsible for a reduction in nucleobase editing efficiency in cells. In such embodiments, uracil DNA glycosylase (UDG) can catalyze removal of U from DNA in cells, which can initiate base excision repair (BER), mostly resulting in reversion of the U:G pair to a C:G pair. In such embodiments, BER can be inhibited in base editors comprising one or more domains that bind the single strand, block the edited base, inhibit UGI, inhibit BER, protect the edited base, and/or promote repairing of the non-edited strand. Thus, this disclosure contemplates a base editor fusion protein or complex comprising a UGI domain and/or a uracil stabilizing protein (USP) domain.

### Base Editor System

[0285] Provided herein are systems, compositions, and methods for editing a nucleobase using a base editor system. In some embodiments, the base editor system comprises (1) a base editor (BE) comprising a polynucleotide programmable nucleotide binding domain and a nucleobase editing domain (e.g., a deaminase domain) for editing the nucleobase; and (2) a guide polynucleotide (e.g., guide RNA) in conjunction with the polynucleotide programmable nucleotide binding domain. In some embodiments, the base editor system is a cytidine base editor (CBE) or an adenosine base editor (ABE). In some embodiments, the polynucleotide programmable nucleotide binding domain is a polynucleotide programmable DNA or RNA binding domain. In some embodiments, the nucleobase editing domain is a deaminase domain. In some embodiments, a deaminase domain can be a cytidine deaminase or an cytosine deaminase. In some embodiments, a deaminase domain can be an adenine deaminase or an adenosine deaminase. In some embodiments, the adenosine base editor can deaminate adenine in DNA. In some embodiments, the base editor is capable of deaminating a cytidine in DNA.

[0286] Use of the base editor system provided herein comprises the steps of (a) contacting a target nucleotide sequence of a polynucleotide (e.g., double- or single stranded DNA or RNA) of a subject with a base editor system comprising a nucleobase editor (e.g., an adenosine base editor or a cytidine base editor) and a guide polynucleotide (e.g., gRNA), wherein the target nucleotide sequence comprises a targeted nucleobase pair; (b) inducing strand separation of said target region; (c) converting a first nucleobase of said target nucleobase pair in a single strand of the target region to a second nucleobase; and (d) cutting no more than one strand of said target region, where a third nucleobase complementary to the first nucleobase base is replaced by a fourth nucleobase complementary to the second nucleobase. It should be appreciated that in some embodiments, step (b) is omitted. In some embodiments, said targeted nucleobase pair is a plurality of nucleobase pairs in one or more genes. In some embodiments, the base editor system provided herein is capable of multiplex editing of a plurality of nucleobase pairs in one or more genes. In some embodiments, the plurality of nucleobase pairs is located in the same gene. In some embodiments, the plurality of nucleobase pairs is located in one or more genes, wherein at least one gene is located in a different locus.

[0287] The components of a base editor system (e.g., a deaminase domain, a guide RNA, and/or a polynucleotide programmable nucleotide binding domain) may be associated with each other covalently or non-covalently. For example, in some embodiments, the deaminase domain can be targeted to a target nucleotide sequence by a polynucleotide programmable nucleotide binding domain, optionally where the polynucleotide programmable nucleotide binding domain is complexed with a polynucleotide (e.g., a guide RNA). In some embodiments, a polynucleotide programmable nucleotide binding domain can be fused or linked to a deaminase domain. In some embodiments, a polynucleotide programmable nucleotide binding domain can target a deaminase domain to a target nucleotide sequence by non-covalently interacting with or associating with the deaminase domain. For example, in some embodiments, the nucleobase editing component (e.g., the deaminase component) comprises an additional heterologous portion or domain that is capable of interacting with, associating with, or capable of forming a complex with a corresponding heterologous portion, antigen, or domain that is part of a polynucleotide programmable nucleotide binding domain and/or a guide polynucleotide (e.g., a guide RNA) complexed therewith. In some embodiments, the polynucleotide programmable nucleotide binding domain, and/or a guide polynucleotide (e.g., a guide RNA) complexed therewith, comprises an additional heterologous portion or domain that is capable of interacting with, associating with, or capable of forming a complex with a corresponding heterologous portion, antigen, or domain that is part of a nucleobase editing domain (e.g., the deaminase component). In some embodiments, the additional heterologous portion may be capable of binding to, interacting with, associating with, or forming a complex with a polypeptide. In some embodiments, the additional heterologous portion may be capable of binding to, interacting with, associating with, or forming a complex with a polynucleotide. In some embodiments, the additional heterologous portion may be capable of binding to a guide polynucleotide. In some embodiments, the additional heterologous portion may be capable of binding to a polypeptide linker. In some embodiments, the additional heterologous portion is capable of binding to a polynucleotide linker. An additional heterologous portion may be a protein domain. In some embodiments, an additional heterologous portion comprises a polypeptide, such as a 22 amino acid RNA-binding domain of the lambda bacteriophage antiterminator protein N (N22p), a 2G12 IgG homodimer domain, an ABI, an antibody (e.g. an antibody that binds a component of the base editor system or a heterologous portion thereof) or fragment thereof (e.g. heavy chain domain 2 (CH2) of IgM (MHD2) or IgE (EHD2), an immunoglobulin Fc region, a heavy chain domain 3 (CH3) of IgG or IgA, a heavy chain domain 4 (CH4) of IgM or IgE, an Fab, an Fab2, miniantibodies, and/or ZIP antibodies), a barnase-barstar dimer domain, a Bcl-xL domain, a Calcineurin A (CAN) domain, a Cardiac phospholamban transmembrane pentamer domain, a collagen domain, a Com RNA binding protein domain (e.g. SfMu Com coat protein domain, and SfMu Com binding protein domain), a Cyclophilin-Fas fusion protein (CyP-Fas) domain, a Fab domain, an Fc domain, a fibritin foldon domain, an FK506 binding protein (FKBP) domain, an FKBP binding domain (FRB) domain of mTOR, a foldon domain, a fragment X domain, a GAI domain, a GID1 domain, a Glycophorin A transmembrane domain, a GyrB domain, a Halo tag, an HIV Gp41 trimerisation domain, an HPV45 oncoprotein E7 C-terminal dimer domain, a hydrophobic polypeptide, a K Homology (KH) domain, a Ku protein domain (e.g., a Ku heterodimer), a leucine zipper, a LOV domain, a mitochondrial antiviral-signaling protein CARD filament domain, an MS2 coat protein domain (MCP), a non-natural RNA aptamer ligand that binds a corresponding RNA motif/aptamer, a parathyroid hormone dimerization domain, a PP7 coat protein (PCP) domain, a PSD95-Dlgl-zo-1 (PDZ) domain, a PYL domain, a SNAP tag, a SpyCatcher moiety, a SpyTag moiety, a streptavidin domain, a streptavidin-binding protein domain, a streptavidin binding protein (SBP) domain, a telomerase Sm7 protein domain (e.g. Sm7 homoheptamer or a monomeric Sm-like protein), and/or fragments thereof. In embodiments, an additional heterologous portion comprises a polynucleotide (e.g., an RNA motif), such as an MS2 phage operator stem-loop (e.g., an MS2, an MS2 C-5 mutant, or an MS2 F-5 mutant), a non-natural RNA motif, a PP7 operator stem-loop, an SfMu phate Com stem-loop, a steril alpha motif, a telomerase Ku binding motif, a telomerase Sm7 binding motif, and/or fragments thereof. Non-limiting examples of additional heterologous portions include polypeptides with at least about 85% sequence identity to any one or more of SEQ ID NOs: 380, 382, 384, 386-388, or fragments thereof. Non-limiting examples of additional heterologous portions include polynucleotides with at least about 85% sequence identity to any one or more of SEQ ID NOs: 379, 381, 383, 385, or fragments thereof.

[0288] In some instances, components of the base editing system are associated with one another through the interaction of leucine zipper domains (e.g., SEQ ID NOs: 387 and 388). In some cases, components of the base editing system are associated with one another through polypeptide domains (e.g., FokI domains) that associate to form protein complexes containing about, at least about, or no more than about 1, 2 (i.e., dimerize), 3, 4, 5, 6, 7, 8, 9, 10 polypeptide domain units, optionally the polypeptide domains may include alterations that reduce or eliminate an activity thereof.

[0289] In some instances, components of the base editing system are associated with one another through the interaction of multimeric antibodies or fragments thereof (e.g., IgG, IgD, IgA, IgM, IgE, a heavy chain domain 2 (CH2) of IgM (MHD2) or IgE (EHD2), an immunoglobulin Fc region, a heavy chain domain 3 (CH3) of IgG or IgA, a heavy chain domain 4 (CH4) of IgM or IgE, an Fab, and an Fab2). In some instances, the antibodies are dimeric, trimeric, or tetrameric. In embodiments, the dimeric antibodies bind a polypeptide or polynucleotide component of the base editing system.

[0290] In some cases, components of the base editing system are associated with one another through the interaction of a polynucleotide-binding protein domain(s) with a polynucleotide(s). In some instances, components of the base editing system are associated with one another through the interaction of one or more polynucleotide-binding protein domains with polynucleotides that are self-complementary and/or complementary to one another so that complementary binding of the polynucleotides to one another brings into association their respective bound polynucleotide-binding protein domain(s).

[0291] In some instances, components of the base editing system are associated with one another through the interaction of a polypeptide domain(s) with a small molecule(s) (e.g., chemical inducers of dimerization (CIDs), also known as “dimerizers”). Non-limiting examples of CIDs include those disclosed in Amara, et al., “A versatile synthetic dimerizer for the regulation of protein-protein interactions,” PNAS, 94:10618-10623 (1997); and VoB, et al. “Chemically induced dimerization: reversible and spatiotemporal control of protein function in cells,” Current Opinion in Chemical Biology, 28:194-201 (2015), the disclosures of each of which are incorporated herein by reference in their entireties for all purposes. In some embodiments, the base editor inhibits base excision repair (BER) of the edited strand. In some embodiments, the base editor protects or binds the non-edited strand. In some embodiments, the base editor comprises UGI activity or USP activity. In some embodiments, the base editor comprises a catalytically inactive inosine-specific nuclease.

[0292] The base editors of the present disclosure can comprise any domain, feature or amino acid sequence which facilitates the editing of a target polynucleotide sequence. For example, in some embodiments, the base editor comprises a nuclear localization sequence (NLS). In some embodiments, an NLS of the base editor is localized between a deaminase domain and a polynucleotide programmable nucleotide binding domain. In some embodiments, an NLS of the base editor is localized C-terminal to a polynucleotide programmable nucleotide binding domain.

[0293] Protein domains included in the fusion protein can be a heterologous functional domain. Non-limiting examples of protein domains which can be included in the fusion protein include a deaminase domain (e.g., cytidine deaminase and/or adenosine deaminase), a uracil glycosylase inhibitor (UGI) domain, epitope tags, and reporter gene sequences.

[0294] In some embodiments, the adenosine base editor (ABE) can deaminate adenine in DNA. In some embodiments, ABE is generated by replacing APOBEC1 component of BE3 with natural or engineered E. coli TadA, human ADAR2, mouse ADA, or human ADAT2. In some embodiments, ABE comprises an evolved TadA variant. In some embodiments, the base editor is ABE8.1, which comprises or consists essentially of the following sequence or a fragment thereof having adenosine deaminase activity: SEQ ID NO: 331. Other ABE8 sequences are provided in the attached sequence listing (SEQ ID NOs: 332-354).

[0295] In some embodiments, the base editor includes an adenosine deaminase variant comprising an amino acid sequence, which contains alterations relative to an ABE 7*10 reference sequence, as described herein. The term “monomer” as used in Table 7 refers to a monomeric form of TadA*7.10 comprising the alterations described. The term “heterodimer” as used in Table 7 refers to the specified wild-type E. co/i TadA adenosine deaminase fused to a TadA*7.10 comprising the alterations as described.

TABLE 7
Adenosine Deaminase Base Editor Variants

| | Adenosine | |
|---|---|---|
| ABE | Deaminase | Adenosine Deaminase Description |
| ABE-605m | MSP605 | monomer_TadA*7.10 + V82G + Y147T + Q154S |
| ABE-680m | MSP680 | monomer_TadA*7.10 + I76Y + V82G + Y147T + Q154S |
| ABE-823m | MSP823 | monomer_TadA*7.10 + L36H + V82G + Y147T + Q154S + |
| | | N157K |
| ABE-824m | MSP824 | monomer_TadA*7.10 + V82G + Y147D + F149Y + Q154S + |
| | | D167N |
| ABE-825m | MSP825 | monomer_TadA*7.10 + L36H + V82G + Y147D + F149Y + |
| | | Q154S + N157K + D167N |
| ABE-827m | MSP827 | monomer_TadA*7.10 + L36H + I76Y + V82G + Y147T + |
| | | Q154S + N157K |
| ABE-828m | MSP828 | monomer_TadA*7.10 + I76Y + V82G + Y147D + F149Y + |
| | | Q154S + D167N |
| ABE-829m | MSP829 | monomer_TadA*7.10 + L36H + I76Y + V82G + Y147D + |
| | | F149Y + Q154S + N157K + D167N |
| ABE-605d | MSP605 | heterodimer_(WT) + (TadA*7.10 + V82G + Y147T + Q154S) |
| ABE-680d | MSP680 | heterodimer_(WT) + (TadA*7.10 + I76Y + V82G + Y147T + |
| | | Q154S) |
| ABE-823d | MSP823 | heterodimer_(WT) + (TadA*7.10 + L36H + V82G + Y147T + |
| | | Q154S + N157K) |
| ABE-824d | MSP824 | heterodimer_(WT) + (TadA*7.10 + V82G + Y147D + F149Y + |
| | | Q154S + D167N) |
| ABE-825d | MSP825 | heterodimer_(WT) + (TadA*7.10 + L36H+ V82G + Y147D + |
| | | F149Y + Q154S + N157K + D167N) |
| ABE-827d | MSP827 | heterodimer_(WT) + (TadA*7.10 + L36H + I76Y + V82G + |
| | | Y147T + Q154S + N157K) |
| ABE-828d | MSP828 | heterodimer_(WT) + (TadA*7.10 + I76Y + V82G + Y147D + |
| | | F149Y + Q154S + D167N) |
| ABE-829d | MSP829 | heterodimer_(WT) + (TadA*7.10 + L36H + I76Y + V82G + |
| | | Y147D + F149Y + Q154S + N157K + D167N) |

[0296] In some embodiments, the base editor comprises a domain comprising all or a portion (e.g., a functional portion) of a uracil glycosylase inhibitor (UGI) or a uracil stabilizing protein (USP) domain.

### Linkers

[0297] In certain embodiments, linkers may be used to link any of the peptides or peptide domains of the disclosure. The linker may be as simple as a covalent bond, or it may be a polymeric linker many atoms in length. In certain embodiments, the linker is a polypeptide or based on amino acids. In other embodiments, the linker is not peptide-like. In certain embodiments, the linker is a covalent bond (e.g., a carbon-carbon bond, disulfide bond, carbon-heteroatom bond, etc.).

[0298] In some embodiments, any of the fusion proteins provided herein, comprise a cytidine or adenosine deaminase and a Cas9 domain that are fused to each other via a linker. Various linker lengths and flexibilities between the cytidine or adenosine deaminase and the Cas9 domain can be employed (e.g., ranging from very flexible linkers of the form (GGGS) n (SEQ ID NO: 246), (GGGGS)ₙ (SEQ ID NO: 247), and (G)ₙ to more rigid linkers of the form (EAAAK)ₙ (SEQ ID NO: 248), (SGGS)ₙ (SEQ ID NO: 355), SGSETPGTSESATPES (SEQ ID NO: 249) (see, e.g., Guilinger J P, et al. Fusion of catalytically inactive Cas9 to FokI nuclease improves the specificity of genome modification. Nat. Biotechnol. 2014; 32(6): 577-82; the entire contents are incorporated herein by reference) and (XP)ₙ) in order to achieve the optimal length for activity for the cytidine or adenosine deaminase nucleobase editor. In some embodiments, n is 1, 2, 3, 4, 5, 6, 7, 8, 9, 10, 11, 12, 13, 14, or 15. In some embodiments, the linker comprises a (GGS)ₙ motif, wherein n is 1, 3, or 7. In some embodiments, cytidine deaminase or adenosine deaminase and the Cas9 domain of any of the fusion proteins provided herein are fused via a linker comprising the amino acid sequence SGSETPGTSESATPES (SEQ ID NO: 249), which can also be referred to as the XTEN linker.

[0299] In some embodiments, the domains of the base editor are fused via a linker that comprises the amino acid sequence of:

(SEQ ID NO: 356)
SGGSSGSETPGTSESATPESSGGS,
(SEQ ID NO: 357)
SGGSSGGSSGSETPGTSESATPESSGGSSGGS,
(SEQ ID NO: 358)
GGSGGSPGSPAGSPTSTEEGTSESATPESGPGTSTEPSEGSAPGSPAG
SPTSTEEGTSTEPSEGSAPGTSTEPSEGSAPGTSESATPESGPGSEPA
TSGGSGGS,
(SEQ ID NO: 468)
EGGSEEEEESGS,
or
(SEQ ID NO: 469)
KGPKPKKEESEK.

[0300] In some embodiments, domains of the base editor are fused via a linker comprising the amino acid sequence SGSETPGTSESATPES (SEQ ID NO: 249), which may also be referred to as the XTEN linker. In some embodiments, a linker comprises the amino acid sequence SGGS (SEQ ID NO: 355). In some embodiments, the linker is 24 amino acids in length. In some embodiments, the linker comprises the amino acid sequence SGGSSGGSSGSETPGTSESATPES (SEQ ID NO: 359). In some embodiments, the linker is 40 amino acids in length. In some embodiments, the linker comprises the amino acid sequence: SGGSSGGSSGSETPGTSESATPESSGGSSGGSSGGSSGGS (SEQ ID NO: 360). In some embodiments, the linker is 64 amino acids in length. In some embodiments, the linker comprises the amino acid sequence: SGGSSGGSSGSETPGTSESATPESSGGSSGGSSGGSSGGSSGSETPGTSESATPESSGGSSGGS (SEQ ID NO: 361). In some embodiments, the linker is 92 amino acids in length. In some embodiments, the linker comprises the amino acid sequence:

(SEQ ID NO: 362)
PGSPAGSPTSTEEGTSESATPESGPGTSTEPSEGSAPGSPAGSPTSTE
EGTSTEPSEGSAPGTSTEPSEGSAPGTSESATPESGPGSEPATS.

[0301] In some embodiments, a linker comprises a plurality of proline residues and is 5-21, 5-14, 5-9, 5-7 amino acids in length, e.g., PAPAP (SEQ ID NO: 363), PAPAPA (SEQ ID NO: 364), PAPAPAP (SEQ ID NO: 365), PAPAPAPA (SEQ ID NO: 366), P(AP)4 (SEQ ID NO: 367), P(AP)7 (SEQ ID NO: 368), P(AP)10 (SEQ ID NO: 369) (see, e.g., Tan J, Zhang F, Karcher D, Bock R. Engineering of high-precision base editors for site-specific single nucleotide replacement. Nat Commun. 2019 Jan. 25; 10(1):439; the entire contents are incorporated herein by reference). Such proline-rich linkers are also termed “rigid” linkers.

Nucleic Acid Programmable DNA Binding Proteins with Guide RNAs

[0302] Provided herein are compositions and methods for base editing in cells. Further provided herein are compositions comprising a guide polynucleotide sequence, e.g., a guide RNA sequence, or a combination of 2, 3, 4, 5, 6, 7, 8, 9, 10, 11, 12, 13, 14, 15, 16, 17, 18, 19, 20, or more guide RNAs as provided herein. In some embodiments, a composition for base editing as provided herein further comprises a polynucleotide that encodes a base editor, e.g., a C-base editor or an A-base editor. For example, a composition for base editing may comprise a mRNA sequence encoding a BE, a BE4, an ABE, and a combination of one or more guide RNAs as provided. A composition for base editing may comprise a base editor polypeptide and a combination of one or more of any guide RNAs provided herein. Such a composition may be used to effect base editing in a cell through different delivery approaches, for example, electroporation, nucleofection, viral transduction or transfection. In some embodiments, the composition for base editing comprises an mRNA sequence that encodes a base editor and a combination of one or more guide RNA sequences provided herein for electroporation.

[0303] Some aspects of this disclosure provide systems comprising any of the fusion proteins or complexes provided herein, and a guide RNA bound to a nucleic acid programmable DNA binding protein (napDNAbp) domain (e.g., a Cas9 (e.g., a dCas9, a nuclease active Cas9, or a Cas9 nickase) or Cas12) of the fusion protein or complex. These complexes are also termed ribonucleoproteins (RNPs). In some embodiments, the guide nucleic acid (e.g., guide RNA) is from 15-100 nucleotides long and comprises a sequence of at least 10 contiguous nucleotides that is complementary to a target sequence. In some embodiments, the target sequence is a DNA sequence. In some embodiments, the target sequence is an RNA sequence. In some embodiments, the target sequence is a sequence in the genome of a bacteria, yeast, fungi, insect, plant, or animal. In some embodiments, the target sequence is a sequence in the genome of a human. In some embodiments, the 3′ end of the target sequence is immediately adjacent to a canonical PAM sequence (NGG). In some embodiments, the 3′ end of the target sequence is immediately adjacent to a non-canonical PAM sequence (e.g., a sequence listed in Table 3 or 5′-NAA-3′). In some embodiments, the guide nucleic acid (e.g., guide RNA) is complementary to a sequence in a gene of interest (e.g., a gene associated with a disease or disorder).

[0304] Some aspects of this disclosure provide methods of using the fusion proteins, or complexes provided herein. For example, some aspects of this disclosure provide methods comprising contacting a DNA molecule with any of the fusion proteins or complexes provided herein, and with at least one guide RNA, wherein the guide RNA is about 15-100 nucleotides long and comprises a sequence of at least 10 contiguous nucleotides that is complementary to a target sequence.

[0305] The domains of the base editor disclosed herein can be arranged in any order.

[0306] A defined target region can be a deamination window. A deamination window can be the defined region in which a base editor acts upon and deaminates a target nucleotide. In some embodiments, the deamination window is within a 2, 3, 4, 5, 6, 7, 8, 9, or 10 base regions. In some embodiments, the deamination window is 5, 6, 7, 8, 9, 10, 11, 12, 13, 14, 15, 16, 17, 18, 19, 20, 21, 22, 23, 24, or 25 bases upstream of the PAM.

[0307] The base editors of the present disclosure can comprise any domain, feature or amino acid sequence which facilitates the editing of a target polynucleotide sequence.

### Methods of Using Fusion Proteins or Complexes Comprising a Cytidine or Adenosine Deaminase and a Cas9 Domain

[0308] Some aspects of this disclosure provide methods of using the fusion proteins, or complexes provided herein. For example, some aspects of this disclosure provide methods comprising contacting a DNA molecule with any of the fusion proteins or complexes provided herein, and with at least one guide RNA described herein.

[0309] In some embodiments, a fusion protein or complex of the disclosure is used for editing a target gene of interest. In particular, a cytidine deaminase or adenosine deaminase nucleobase editor described herein is capable of making multiple mutations within a target sequence. These mutations may affect the function of the target. For example, when a cytidine deaminase or adenosine deaminase nucleobase editor is used to target a regulatory region the function of the regulatory region is altered and the expression of the downstream protein is reduced or eliminated.

### Base Editor Efficiency

[0310] In some embodiments, the purpose of the methods provided herein is to alter a gene and/or gene product via gene editing. The nucleobase editing proteins provided herein can be used for gene editing-based human therapeutics in vitro or in vivo. It will be understood by the skilled artisan that the nucleobase editing proteins provided herein, e.g., the fusion proteins or complexes comprising a polynucleotide programmable nucleotide binding domain (e.g., Cas9) and a nucleobase editing domain (e.g., an adenosine deaminase domain or a cytidine deaminase domain) can be used to edit a nucleotide from A to G or C to T.

[0311] Advantageously, base editing systems as provided herein provide genome editing without generating double-strand DNA breaks, without requiring a donor DNA template, and without inducing an excess of stochastic insertions and deletions as CRISPR may do. In some embodiments, the present disclosure provides base editors that efficiently generate an intended mutation, such as a STOP codon, in a nucleic acid (e.g., a nucleic acid within a genome of a subject) without generating a significant number of unintended mutations, such as unintended point mutations.

[0312] The base editors of the disclosure advantageously modify a specific nucleotide base encoding a protein without generating a significant proportion of indels (i.e., insertions or deletions). Such indels can lead to frame shift mutations within a coding region of a gene.

[0313] In some embodiments, the base editors provided herein are capable of generating a ratio of intended mutations to indels (i.e., intended point mutations:unintended point mutations) that is greater than 1:1. In some embodiments, the base editors provided herein are capable of generating a ratio of intended mutations to indels that is at least 1.5:1, at least 2:1, at least 2.5:1, at least 3:1, at least 3.5:1, at least 4:1, at least 4.5:1, at least 5:1, at least 5.5:1, at least 6:1, at least 6.5:1, at least 7:1, at least 7.5:1, at least 8:1, at least 10:1, at least 12:1, at least 15:1, at least 20:1, at least 25:1, at least 30:1, at least 40:1, at least 50:1, at least 100:1, at least 200:1, at least 300:1, at least 400:1, at least 500:1, at least 600:1, at least 700:1, at least 800:1, at least 900:1, or at least 1000:1, or more. The number of intended mutations and indels may be determined using any suitable method.

[0314] In some embodiments, the base editors provided herein can limit formation of indels in a region of a nucleic acid. In some embodiments, the region is at a nucleotide targeted by a base editor or a region within 2, 3, 4, 5, 6, 7, 8, 9, or 10 nucleotides of a nucleotide targeted by a base editor. In some embodiments, any of the base editors provided herein can limit the formation of indels at a region of a nucleic acid to less than T %, less than 1.5%, less than 2%, less than 2.5%, less than 3%, less than 3.5%, less than 4%, less than 4.5%, less than 5%, less than 6%, less than 7%, less than 8%, less than 9%, less than 10%, less than 12%, less than 15%, or less than 20%.

[0315] Base editing is often referred to as a “modification”, such as, a genetic modification, a gene modification and modification of the nucleic acid sequence and is clearly understandable based on the context that the modification is a base editing modification. A base editing modification is therefore a modification at the nucleotide base level, for example as a result of the deaminase activity discussed throughout the disclosure, which then results in a change in the gene sequence and may affect the gene product.

[0316] In some embodiments, the modification, e.g., single base edit results in about or at least about a 10%, 15%, 20%, 25%, 30%, 35%, 40%, 45%, 50%, 55%, 60%, 65%, 70%, 75%, 80%, 85%, 90%, 95%, 99%, or 100% reduction, or reduction to an undetectable level, of the gene targeted expression.

[0317] The disclosure provides adenosine deaminase variants (e.g., ABE8 variants) that have increased efficiency and specificity. In particular, the adenosine deaminase variants described herein are more likely to edit a desired base within a polynucleotide and are less likely to edit bases that are not intended to be altered (e.g., “bystanders”).

[0318] In some embodiments, any of the base editing system comprising one of the ABE8 base editor variants described herein has reduced bystander editing or mutations by at least 1%, 2%, 3%, 4%, 5%, 10%, 15%, 20%, 25%, 30%, 35%, 40%, 45%, 50%, 55%, 60%, 65%, 70%, 75%, 80%, 85%, 90%, 95%, or 99% compared to a base editor system comprising an ABE7 base editor, e.g., ABE7.10.

[0319] In some embodiments, any of the ABE8 base editor variants described herein has higher base editing efficiency compared to the ABE7 base editors. In some embodiments, any of the ABE8 base editor variants described herein have at least 1%, 2%, 3%, 4%, 5%, 10%, 15%, 20%, 25%, 30%, 35%, 40%, 45%, 50%, 55%, 60%, 65%, 70%, 75%, 80%, 85%, 90%, 95%, 99%, 100%, 105%, 110%, 115%, 120%, 125%, 130%, 135%, 140%, 145%, 150%, 155%, 160%, 165%, 170%, 175%, 180%, 185%, 190%, 195%, 200%, 210%, 220%, 230%, 240%, 250%, 260%, 270%, 280%, 290%, 300%, 310%, 320%, 330%, 340%, 350%, 360%, 370%, 380%, 390%, 400%, 450%, or 500% higher base editing efficiency compared to an ABE7 base editor, e.g., ABE7.10.

[0320] The ABE8 base editor variants described herein may be delivered to a host cell via a plasmid, a vector, a LNP complex, or an mRNA. In some embodiments, any of the ABE8 base editor variants described herein is delivered to a host cell as an mRNA.

[0321] In some embodiments, the method described herein, for example, the base editing methods has minimum to no off-target effects. In some embodiments, the method described herein, for example, the base editing methods, has minimal to no chromosomal translocations.

[0322] In some embodiments, the base editing method described herein results in about 91%, 92%, 93%, 94%, 95%, 96%, 97%, 98%, 99% or 100% of a cell population that have been successfully edited.

[0323] In some embodiments, the percent of viable cells in a cell population following a base editing intervention is greater than at least 60%, 70%, 80%, or 90% of the starting cell population at the time of the base editing event. In some embodiments, the percent of viable cells in a cell population following editing is about 70%. In some embodiments, the percent of viable cells in a cell population following editing is about 75%. In some embodiments, the percent of viable cells in a cell population following editing is about 80%. In some embodiments, the percent of viable cells in a cell population as described above is about 85%. In some embodiments, the percent of viable cells in a cell population as described above is about 90%, or about 91%, 92%, 93%, 94% 95%, 96%, 97%, 98%, 99%, or 100% of the cells in the population at the time of the base editing event.

[0324] In embodiments, the cell population is a population of cells contacted with a base editor, complex, or base editor system of the present disclosure.

[0325] The number of intended mutations and indels can be determined using any suitable method, for example, as described in International PCT Application Nos. PCT/US2017/045381 (WO2018/027078) and PCT/US2016/058344 (WO2017/070632); Komor, A. C., et al., “Programmable editing of a target base in genomic DNA without double-stranded DNA cleavage” Nature 533, 420-424 (2016); Gaudelli, N. M., et al., “Programmable base editing of A·T to G·C in genomic DNA without DNA cleavage” Nature 551, 464-471 (2017); and Komor, A. C., et al., “Improved base excision repair inhibition and bacteriophage Mu Gam protein yields C:G-to-T:A base editors with higher efficiency and product purity” Science Advances 3:eaao4774 (2017); the entire contents of which are hereby incorporated by reference.

[0326] In some embodiments, to calculate indel frequencies, sequencing reads are scanned for exact matches to two 10-bp sequences that flank both sides of a window in which indels can occur. If no exact matches are located, the read is excluded from analysis. If the length of this indel window exactly matches the reference sequence the read is classified as not containing an indel. If the indel window is two or more bases longer or shorter than the reference sequence, then the sequencing read is classified as an insertion or deletion, respectively. In some embodiments, the base editors provided herein can limit formation of indels in a region of a nucleic acid. In some embodiments, the region is at a nucleotide targeted by a base editor or a region within 2, 3, 4, 5, 6, 7, 8, 9, or 10 nucleotides of a nucleotide targeted by a base editor.

### Multiplex Editing

[0327] In some embodiments, the base editor system provided herein is capable of multiplex editing of a plurality of nucleobase pairs in one or more genes or polynucleotide sequences. In some embodiments, the plurality of nucleobase pairs is located in the same gene or in one or more genes, wherein at least one gene is located in a different locus. In some embodiments, the multiplex editing comprises one or more guide polynucleotides. In some embodiments, the multiplex editing comprises one or more base editor systems. In some embodiments, the multiplex editing comprises one or more base editor systems with a single guide polynucleotide or a plurality of guide polynucleotides. In some embodiments, the multiplex editing comprises one or more guide polynucleotides with a single base editor system. It should be appreciated that the characteristics of the multiplex editing using any of the base editors as described herein can be applied to any combination of methods using any base editor provided herein. It should also be appreciated that the multiplex editing using any of the base editors as described herein can comprise a sequential editing of a plurality of nucleobase pairs.

[0328] In some embodiments, the base editor system capable of multiplex editing of a plurality of nucleobase pairs in one or more genes comprises one of ABE7, ABE8, and/or ABE9 base editors.

### Expression of Fusion Proteins or Complexes in a Host Cell

[0329] Fusion proteins or complexes of the disclosure comprising an adenosine deaminase variant may be expressed in virtually any host cell of interest, including but not limited to animal cells using routine methods known to the skilled artisan. For example, a DNA encoding an adenosine deaminase of the disclosure can be cloned by designing suitable primers for the upstream and downstream of CDS based on the cDNA sequence. The cloned DNA may be directly, or after digestion with a restriction enzyme when desired, or after addition of a suitable linker and/or a nuclear localization signal, ligated with a DNA encoding one or more additional components of a base editing system. The base editing system is translated in a host cell to form a complex.

[0330] A DNA encoding a protein domain described herein can be obtained by chemically synthesizing the DNA, or by connecting synthesized partly overlapping oligoDNA short chains by utilizing the PCR method and the Gibson Assembly method to construct a DNA encoding the full length thereof The advantage of constructing a full-length DNA by chemical synthesis or a combination of PCR method or Gibson Assembly method is that the codon to be used can be designed in CDS full-length according to the host into which the DNA is introduced. In the expression of a heterologous DNA, the protein expression level is expected to increase by converting the DNA sequence thereof to a codon highly frequently used in the host organism.

[0331] As the data of codon use frequency in host to be used, for example, the genetic code use frequency database (kazusa.or.jp/codon/index.html) disclosed in the home page of Kazusa DNA Research Institute can be used, or documents showing the codon use frequency in each host may be referred to. By reference to the obtained data and the DNA sequence to be introduced, codons showing low use frequency in the host from among those used for the DNA sequence may be converted to a codon coding the same amino acid and showing high use frequency.

[0332] An expression vector containing a DNA encoding a nucleic acid sequence-recognizing module and/or a nucleic acid base converting enzyme can be produced, for example, by linking the DNA to the downstream of a promoter in a suitable expression vector.

[0333] As the expression vector, animal cell expression plasmids (e.g., pA1-11, pXT1, pRc/CMV, pRc/RSV, pcDNAI/Neo) are known in the art; animal virus vectors such as retrovirus, vaccinia virus, adenovirus and the like, and the like are used.

[0334] Regarding the promoter to be used, any promoter appropriate for a host to be used for gene expression can be used. In a conventional method using double-stranded breaks, since the survival rate of the host cell sometimes decreases markedly due to the toxicity, it is desirable to increase the number of cells by the start of the induction by using an inductive promoter. However, since sufficient cell proliferation can also be afforded by expressing the nucleic acid-modifying enzyme complex of the present disclosure, a constitutive promoter can be used without limitation.

[0335] For example, when the host is an animal cell, an SR.alpha. promoter, SV40 promoter, LTR promoter, cytomegalovirus (CMV) promoter, Rous sarcoma virus (RSV) promoter, Moloney mouse leukemia virus (MoMuLV), LTR, herpes simplex virus thymidine kinase (HSV-TK) promoter, and the like can be used. Of these, CMV promoter, SR.alpha. promoter and the like are preferable.

[0336] Expression vectors for use in the present disclosure, besides those mentioned above, can comprise an enhancer, a splicing signal, a terminator, a polyA addition signal, a selection marker such as drug resistance gene, an auxotrophic complementary gene and the like, a replication origin, and the like can be used.

[0337] An RNA encoding a protein domain described herein can be prepared by, for example, in vitro transcription of a nucleic acid sequence encoding any of the fusion proteins or protein complexes disclosed herein.

[0338] A fusion protein or complex of the disclosure can be intracellularly expressed by introducing into the cell an expression vector comprising a nucleic acid sequence encoding the fusion protein or complex.

[0339] Mammalian cells contemplated in the present disclosure include, but are not limited to, cell lines such as Human Embryonic Kidney (HEK) cells, monkey COS-7 cells, monkey Vero cells, Chinese hamster ovary (CHO) cells, dhfr gene-deficient CHO cells, mouse L cells, mouse AtT-20 cells, mouse myeloma cells, rat GH3 cells, human FL cells and the like, pluripotent stem cells such as iPS cells, ES cells derived humans and other mammals, and primary cultured cells prepared from various tissues. Furthermore, zebrafish embryo, Xenopus oocyte, and the like can also be used.

[0340] Using conventional methods, mutations, in principle, introduced into only one homologous chromosome produce a heterogenous cell. Therefore, the desired phenotype is not expressed unless the mutation is dominant. For recessive mutations, acquiring a homozygous cell can be inconvenient due to labor and time requirements. In contrast, according to the present disclosure, since a mutation can be introduced into any allele on the homologous chromosome in the genome, the desired phenotype can be expressed in a single generation even in the case of recessive mutation, thereby solving the problem associated with conventional mutagenesis methods.

[0341] An expression vector can be introduced by a known method (e.g., the lysozyme method, the competent method, the PEG method, the CaCl₂) coprecipitation method, electroporation, microinjection, particle gun method, lipofection, Agrobacterium-mediated delivery, etc.) according to the kind of the host.

[0342] A vector can be introduced into an animal cell according to the methods described in, for example, Cell Engineering additional volume 8, New Cell Engineering Experiment Protocol, 263-267 (1995) (published by Shujunsha), and Virology, 52, 456 (1973).

[0343] A cell comprising a vector can be cultured according to a known method according to the kind of the host.

[0344] As a medium for culturing an animal cell, for example, minimum essential medium (MEM) containing about 5 to about 20% of fetal bovine serum [Science, 122, 501 (1952)], Dulbecco's modified Eagle medium (DMEM) [Virology, 8, 396 (1959)], RPMI 1640 medium [The Journal of the American Medical Association, 199, 519 (1967)], 199 medium [Proceeding of the Society for the Biological Medicine, 73, 1 (1950)]and the like are used. The pH of the medium is preferably about 6 to about 8. The culture is performed at generally about 30° C. to about 40° C. Where necessary, aeration and stirring may be performed.

[0345] When a higher eukaryotic cell, such as animal cell, is used as a host cell, a DNA encoding a base editing system of the present disclosure (e.g., comprising an adenosine deaminase variant) is introduced into a host cell under the regulation of an inducible promoter (e.g., metallothionein promoter (induced by heavy metal ion), heat shock protein promoter (induced by heat shock), Tet-ON/Tet-OFF system promoter (induced by addition or removal of tetracycline or a derivative thereof), steroid-responsive promoter (induced by steroid hormone or a derivative thereof) etc.), the induction substance is added to the medium (or removed from the medium) at an appropriate stage to induce expression of the nucleic acid-modifying enzyme complex, culture is performed for a given period to carry out a base editing and, introduction of a mutation into a target gene, transient expression of the base editing system can be realized.

[0346] Alternatively, the above-mentioned inductive promoter can also be utilized as a vector removal mechanism when higher eukaryotic cells, such as animal cell are used as a host cell. That is, a vector is mounted with a replication origin that functions in a host cell, and a nucleic acid encoding a protein necessary for replication (e.g., SV40 on and large T antigen, oriP and EBNA-1 etc. for animal cells), of the expression of the nucleic acid encoding the protein is regulated by the above-mentioned inducible promoter. As a result, while the vector is autonomously replicable in the presence of an induction substance, when the induction substance is removed, autonomous replication is not available, and the vector naturally falls off along with cell division (autonomous replication is not possible by the addition of tetracycline and doxycycline in Tet-OFF system vector).

### Reducing Expression of Target Genes in Cells

[0347] In some embodiments, provided herein is an immune cell with at least one modification in an endogenous gene or one or more regulatory elements thereof. In some embodiments, the immune cell may comprise a further modification in at least one, two, three, four, five, six, seven, eight, nine, ten, eleven, twelve, thirteen, fourteen, fifteen, sixteen, seventeen, eighteen, nineteen, twenty or more endogenous genes or regulatory elements thereof In some embodiments, the at least one modification is a single nucleobase modification. In some embodiments, the at least one modification is generated by base editing. The base editing may be positioned at any suitable position of the gene, or in a regulatory element of the gene. Thus, it may be appreciated that a single base editing at a start codon, for example, can completely abolish the expression of the gene. In some embodiments, the base editing may be performed at a site within an exon. In some embodiments, the base editing may be performed at a site on more than one exons. In some embodiments, the base editing may be performed at any exon of the multiple exons in a gene. In some embodiments, base editing may introduce a premature STOP codon into an exon, resulting in either lack of a translated product or in a truncated that may be misfolded and thereby eliminated by degradation, or may produce an unstable mRNA that is readily degraded. In some embodiments, the immune cell is a T cell. In some embodiments, the cell is a hepatocyte.

[0348] In some embodiments, the gene is an LPA polynucleotide.

[0349] In some embodiments, the editing of the endogenous gene reduces expression of the gene. In some embodiments, the editing of the endogenous gene reduces expression of the gene by at least 50% as compared to a control cell without the modification. In some embodiments, the editing of the endogenous gene reduces expression of the gene by at least 60% as compared to a control cell without the modification. In some embodiments, the editing of the endogenous gene reduces expression of the gene by at least 70% as compared to a control cell without the modification. In some embodiments, the editing of the endogenous gene reduces expression of the gene by at least 80% as compared to a control cell without the modification. In some embodiments, the editing of the endogenous gene reduces expression of the gene by at least 90% as compared to a control cell without the modification. In some embodiments, the editing of the endogenous gene reduces expression of the gene by at least 100% as compared to a control cell without the modification. In some embodiments, the editing of the endogenous gene eliminates gene expression.

[0350] In some embodiments, base editing may be performed on an intron. For example, base editing may be performed on an intron. In some embodiments, the base editing may be performed at a site within an intron. In some embodiments, the base editing may be performed at a site one or more introns. In some embodiments, the base editing may be performed at any exon of the multiple introns in a gene. In some embodiments, one or more base editing may be performed on an exon, an intron or any combination of exons and introns.

[0351] In some embodiments, the modification or base edit may be within a promoter site. In some embodiments, the base edit may be introduced within an alternative promoter site. In some embodiments, the base edit may be in a 5′ regulatory element, such as an enhancer. In some embodiment, base editing may be introduced to disrupt the binding site of a nucleic acid binding protein. Exemplary nucleic acid binding proteins may be a polymerase, nuclease, gyrase, topoisomerase, methylase or methyl transferase, transcription factors, enhancer, PABP, zinc finger proteins, among many others.

[0352] In some embodiments, base editing may be used for splice disruption to silence target protein expression. In some embodiments, base editing may generate a splice acceptor-splice donor (SA-SD) site. Targeted base editing generating a SA-SD, or at a SA-SD site can result in reduced expression of a gene. In some embodiments, base editors (e.g., ABE, CBE) are used to target dinucleotide motifs that constitute splice acceptor and splice donor sites, which are the first and last two nucleotides of each intron. In some embodiments, splice disruption is achieved with an adenosine base editor (ABE). In some embodiments, splice disruption is achieved with a cytidine base editor (CBE). In some embodiments, base editors (e.g., ABE, CBE) are used to edit exons by creating STOP codons.

[0353] In some embodiments, provided herein is a liver cell with at least one modification in one or more endogenous genes. In some embodiments, the liver cell may have at least one modification in one, two, three, four, five, six, seven, eight, nine, ten, eleven, twelve, thirteen, fourteen, fifteen, sixteen, seventeen, eighteen, nineteen, twenty or more endogenous genes. In some embodiments, the modification generates a premature stop codon in the endogenous genes.

[0354] In some embodiments, the STOP codon silences target protein expression. In some embodiments, the modification is a single base modification. In some embodiments, the modification is generated by base editing. The premature stop codon may be generated in an exon, an intron, or an untranslated region. In some embodiments, base editing may be used to introduce more than one STOP codon, in one or more alternative reading frames. In some embodiments, the stop codon is generated by a adenosine base editor (ABE). In some embodiments, the stop codon is generated by a cytidine base editor (CBE). In some embodiments, the CBE generates any one of the following edits (shown in underlined font) to generate a STOP codon: CAG→TAG; CAA→TAA; CGA→TGA; TGG→TGA; TGG→TAG; or TGG→TAA.

[0355] In some embodiments, modification/base edits may be introduced at a 3′-UTR, for example, in a poly adenylation (poly-A) site. In some embodiments, base editing may be performed on a 5′-UTR region.

### Delivery Systems

### Nucleic Acid-Based Delivery of Base Editor Systems

[0356] Nucleic acid molecules encoding a base editor system according to the present disclosure can be administered to subjects or delivered into cells in vitro or in vivo by art-known methods or as described herein. For example, a base editor system comprising a deaminase (e.g., cytidine or adenine deaminase) can be delivered by vectors (e.g., viral or non-viral vectors), or by naked DNA, DNA complexes, lipid nanoparticles, or a combination of the aforementioned compositions. A base editor system may be delivered to a cell using any methods available in the art including, but not limited to, physical methods (e.g., electroporation, particle gun, calcium phosphate transfection), viral methods, non-viral methods (e.g., liposomes, cationic methods, lipid nanoparticles, polymeric nanoparticles), or biological non-viral methods (e.g., attenuated bacterial, engineered bacteriophages, mammalian virus-like particles, biological liposomes, erythrocyte ghosts, exosomes).

[0357] Nanoparticles, which can be organic or inorganic, are useful for delivering a base editor system or component thereof Nanoparticles are well known in the art and any suitable nanoparticle can be used to deliver a base editor system or component thereof, or a nucleic acid molecule encoding such components. In one example, organic (e.g., lipid and/or polymer) nanoparticles are suitable for use as delivery vehicles in certain embodiments of this disclosure. Non-limiting examples of lipid nanoparticles suitable for use in the methods of the present disclosure include those described in International Patent Application Publications No. WO2022140239, WO2022140252, WO2022140238, WO2022159421, WO2022159472, WO2022159475, WO2022159463, WO2021113365, WO2024019936, and WO2021141969, the disclosures of each of which is incorporated herein by reference in its entirety for all purposes.

### Viral Vectors

[0358] A base editor described herein can be delivered with a viral vector. In some embodiments, a base editor disclosed herein can be encoded on a nucleic acid that is contained in a viral vector. In some embodiments, one or more components of the base editor system can be encoded on one or more viral vectors.

[0359] Viral vectors can include lentivirus (e.g., HIV and FIV-based vectors), Adenovirus (e.g., AD100), Retrovirus (e.g., Maloney murine leukemia virus, MML-V), herpesvirus vectors (e.g., HSV-2), rabies virus (see, e.g., U.S. Patent Application Publication No. US 2022/0290164 A1, the disclosure of which is incorporated herein by reference in its entirety for all purposes), and Adeno-associated viruses (AAVs), or other plasmid or viral vector types, in particular, using formulations and doses from, for example, U.S. Pat. No. 8,454,972 (formulations, doses for adenovirus), U.S. Pat. No. 8,404,658 (formulations, doses for AAV) and U.S. Pat. No. 5,846,946 (formulations, doses for DNA plasmids) and from clinical trials and publications regarding the clinical trials involving lentivirus, AAV and adenovirus. For example, for AAV, the route of administration, formulation and dose can be as in U.S. Pat. No. 8,454,972 and as in clinical trials involving AAV. For Adenovirus, the route of administration, formulation and dose can be as in U.S. Pat. No. 8,404,658 and as in clinical trials involving adenovirus. For plasmid delivery, the route of administration, formulation and dose can be as in U.S. Pat. No. 5,846,946 and as in clinical studies involving plasmids. Doses can be based on or extrapolated to an average 70 kg individual (e.g., a male adult human), and can be adjusted for patients, subjects, mammals of different weight and species. Frequency of administration is within the ambit of the medical or veterinary practitioner (e.g., physician, veterinarian), depending on usual factors including the age, sex, general health, other conditions of the patient or subject and the particular condition or symptoms being addressed. The viral vectors can be injected into the tissue of interest. For cell-type specific base editing, the expression of the base editor and optional guide nucleic acid can be driven by a cell-type specific promoter.

[0360] Viral vectors can be selected based on the application. For example, for in vivo gene delivery, AAV can be advantageous over other viral vectors. In some embodiments, AAV allows low toxicity, which can be due to the purification method not requiring ultra-centrifugation of cell particles that can activate the immune response. In some embodiments, AAV allows low probability of causing insertional mutagenesis because it doesn't integrate into the host genome. Adenoviruses are commonly used as vaccines because of the strong immunogenic response they induce. Packaging capacity of the viral vectors can limit the size of the base editor that can be packaged into the vector.

[0361] AAV has a packaging capacity of about 4.5 Kb or 4.75 Kb including two 145 base inverted terminal repeats (ITRs). This means disclosed base editor as well as a promoter and transcription terminator can fit into a single viral vector. Constructs larger than 4.5 or 4.75 Kb can lead to significantly reduced virus production. For example, SpCas9 is quite large, the gene itself is over 4.1 Kb, which makes it difficult for packing into AAV. Therefore, embodiments of the present disclosure include utilizing a disclosed base editor which is shorter in length than conventional base editors. In some examples, the base editors are less than 4 kb. Disclosed base editors can be less than 4.5 kb, 4.4 kb, 4.3 kb, 4.2 kb, 4.1 kb, 4 kb, 3.9 kb, 3.8 kb, 3.7 kb, 3.6 kb, 3.5 kb, 3.4 kb, 3.3 kb, 3.2 kb, 3.1 kb, 3 kb, 2.9 kb, 2.8 kb, 2.7 kb, 2.6 kb, 2.5 kb, 2 kb, or 1.5 kb. In some embodiments, the disclosed base editors are 4.5 kb or less in length.

[0362] An AAV can be AAV1, AAV2, AAV5, AAV6, AAV9, PHP.EB, PHP.B, AAV.CAP-B10, AAV, CAP-B22, AAV-rh10, a PAL family AAV, or any combination thereof. In embodiments, the AAV is capable of crossing the blood-brain barrier (see, e.g., those AAV vectors disclosed in Liu, et al. “Crossing the blood-brain barrier with AAV vectors,” Metabolic Brain Disease, 36:45-52 (2021), the disclosure of which is incorporated herein by reference in its entirety for all purposes). One can select the type of AAV with regard to the cells to be targeted; e.g., one can select AAV serotypes 1, 2, 5 or a hybrid capsid AAV1, AAV2, AAV5 or any combination thereof for targeting brain or neuronal cells; and one can select AAV4 for targeting cardiac tissue. AAV8 is useful for delivery to the liver. A tabulation of certain AAV serotypes as to these cells can be found in Grimm, D. et al, J. Virol. 82: 5887-5911 (2008)).

[0363] In some embodiments, the AAV vector contains a PAL family AAV capsid (see, Stanton, A., et al. Med 4:31-50 (2023) (doi: doi.org/10.1016/j.medj.2022.11.002), the disclosure of which is incorporated herein by reference in its entirety for all purposes).

[0364] In some embodiments, lentiviral vectors are used to transduce a cell of interest with a polynucleotide encoding a base editor or base editor system as provided herein. Lentiviruses are complex retroviruses that have the ability to infect and express their genes in both mitotic and post-mitotic cells. The most commonly known lentivirus is the human immunodeficiency virus (HIV), which uses the envelope glycoproteins of other viruses to target a broad range of cell types.

[0365] In another embodiment, minimal non-primate lentiviral vectors based on the equine infectious anemia virus (EIAV) are also contemplated. In another embodiment, RetinoStat®, an equine infectious anemia virus-based lentiviral gene therapy vector that expresses angiostatic proteins endostatin and angiostatin that is contemplated to be delivered via a subretinal injection. In another embodiment, use of self-inactivating lentiviral vectors are contemplated.

[0366] Any RNA of the systems, for example a guide RNA or a base editor-encoding mRNA, can be delivered in the form of RNA. Base editor-encoding mRNA can be generated using in vitro transcription. For example, nuclease mRNA can be synthesized using a PCR cassette containing the following elements: T7 promoter, optional kozak sequence (GCCACC), nuclease sequence, and 3′ UTR such as a 3′ UTR from beta globin-polyA tail. The cassette can be used for transcription by T7 polymerase. Guide polynucleotides (e.g., gRNA) can also be transcribed using in vitro transcription from a cassette containing a T7 promoter, followed by the sequence “GG”, and guide polynucleotide sequence.

### Non-Viral Platforms for Gene Transfer

[0367] Non-viral platforms for introducing a heterologous polynucleotide into a cell of interest are known in the art.

[0368] For example, the disclosure provides a method of inserting a heterologous polynucleotide into the genome of a cell using a Cas9 or Cas12 (e.g., Cas12b) ribonucleoprotein complex (RNP)-DNA template complex where an RNP including a Cas9 or Cas12 nuclease domain and a guide RNA, wherein the guide RNA specifically hybridizes to a target region of the genome of the cell, and wherein the Cas nuclease domain cleaves the target region to create an insertion site in the genome of the cell. A DNA template is then used to introduce a heterologous polynucleotide. In embodiments, the DNA template is a double-stranded or single-stranded DNA template, wherein the size of the DNA template is about 200 nucleotides or is greater than about 200 nucleotides, wherein the 5′ and 3′ ends of the DNA template comprise nucleotide sequences that are homologous to genomic sequences flanking the insertion site. In some embodiments, the DNA template is a single-stranded circular DNA template. In embodiments, the molar ratio of RNP to DNA template in the complex is from about 3:1 to about 100:1.

[0369] In some embodiments, the DNA template is a linear DNA template. In some examples, the DNA template is a single-stranded DNA template. In certain embodiments, the single-stranded DNA template is a pure single-stranded DNA template. In some embodiments, the single stranded DNA template is a single-stranded oligodeoxynucleotide (ssODN).

[0370] In other embodiments, a single-stranded DNA (ssDNA) can produce efficient homology-directed repair (HDR) with minimal off-target integration. In one embodiment, an ssDNA phage is used to efficiently and inexpensively produce long circular ssDNA (cssDNA) donors. These cssDNA donors serve as efficient HDR templates when used with Cas9 or Cas12 (e.g., Cas12a, Cas12b), with integration frequencies superior to linear ssDNA (QssDNA) donors.

[0371] In some embodiments, a heterologous polynucleotide may be inserted into the genome of a cell using a transposable element such as a transposon, as described, for example, in Tipanee, et al. Human Gene Therapy, November 2017, 1087-1104, DOI: 10.1089/hum.2017.128. Transposable elements are divided into two categories: retrotransposons and DNA transposons. Transposable elements can alter the genome of the host cells through insertions, duplications, deletions, and translocations. Retrotransposons are described as mobile elements that employ an RNA intermediate that is first reverse transcribed into a complementary single-stranded (c) DNA strand by a reverse transcriptase encoded by the retrotransposon. Subsequently, the single-stranded DNA is converted into a double-stranded DNA that then integrates into the host genome. This so-called “replicative mechanism” yields several new copies of retrotransposons expanding throughout the target genome over evolutionary time. Retrotransposons are categorized into many subtypes according to the DNA sequences of the long terminal repeats and its open reading frames. Retrotransposons were employed to enable transgene integration into the target cell DNA, in some cases relying on adenoviral delivery. Alternatively, DNA transposons translocate via a “non-replicative mechanism,” whereby two Terminal Inverted Repeats (TIRs) are recognized and cleaved by a transposase enzyme, releasing the cognate DNA transposons with free DNA ends. The excised DNA transposons then integrate into a new genomic region where target sites are recognized and cut by the same transposase. This cut-and-paste mechanism usually duplicates DNA target sites upon insertion, leaving target site duplications (TSDs). Non-limiting examples of transposons include the Sleeping Beauty (SB) transposon, the piggyBac (PB) transposon, and Tol2 transposable elements.

### Inteins

[0372] Inteins (intervening protein) are auto-processing domains found in a variety of diverse organisms, which carry out a process known as protein splicing.

[0373] Non-limiting examples of inteins include any intein or intein-pair known in the art, which include a synthetic intein based on the dnaE intein, the Cfa-N(e.g., split intein-N) and Cfa-C (e.g., split intein-C) intein pair, has been described (e.g., in Stevens et al., J Am Chem Soc. 2016 Feb. 24; 138(7):2162-5, incorporated herein by reference), and DnaE. Non-limiting examples of pairs of inteins that may be used in accordance with the present disclosure include: Cfa DnaE intein, Ssp GyrB intein, Ssp DnaX intein, Ter DnaE3 intein, Ter ThyX intein, Rma DnaB intein and Cne Prp8 intein (e.g., as described in U.S. Pat. No. 8,394,604, incorporated herein by reference). Exemplary nucleotide and amino acid sequences of inteins are provided in the Sequence Listing at SEQ ID NOs: 370-377 and 389-424. Inteins suitable for use in embodiments of the present disclosure and methods for use thereof are described in U.S. Pat. No. 10,526,401, International Patent Application Publication No. WO 2013/045632, WO 2024/073385, and WO 2020/051561, and in U.S. Patent Application Publication No. US 2020/0055900, the full disclosures of which are incorporated herein by reference in their entireties by reference for all purposes.

[0374] Intein-N and intein-C may be fused to the N-terminal portion of a split Cas9 and the C-terminal portion of the split Cas9, respectively, for the joining of the N-terminal portion of the split Cas9 and the C-terminal portion of the split Cas9. For example, in some embodiments, an intein-N is fused to the C-terminus of the N-terminal portion of the split Cas9, i.e., to form a structure of N—[N-terminal portion of the split Cas9]-[intein-N]—C. In some embodiments, an intein-C is fused to the N-terminus of the C-terminal portion of the split Cas9, i.e., to form a structure of N-[intein-C]—[C-terminal portion of the split Cas9]-C. In embodiments, a base editor is encoded by two polynucleotides, where one polynucleotide encodes a fragment of the base editor fused to an intein-N and another polynucleotide encodes a fragment of the base editor fused to an intein-C. Methods for designing and using inteins are known in the art and described, for example by WO2014004336, WO2017132580, WO2013045632A1, US20150344549, and US20180127780, each of which is incorporated herein by reference in their entirety.

[0375] In some embodiments, an ABE was split into N- and C-terminal fragments at Ala, Ser, Thr, or Cys residues within selected regions of SpCas9. These regions correspond to loop regions identified by Cas9 crystal structure analysis.

[0376] The N-terminal fragment is fused at the C-terminus to an intein-N and the C-terminal fragment is fused to an intein-C at an N-terminal amino acid selected from the group consisting of S303, T310, T313, S355, A456, S460, A463, T466, S469, T472, T474, C574, S577, A589, and S590, referenced to SEQ ID NO: 197. In various embodiments, the SpCas9 is split between amino acid positions 302 and 303, 309 and 310, 312 and 313, 354 and 355, 455 and 456, 459 and 460, 462 and 463, 465 and 466, 468 and 469, 471 and 472, 473 and 474, 573 and 574, 576 and 577, 588 and 589, or 589 and 590, referenced to SEQ ID NO: 197 to yield an N-terminal fragment and a C-terminal fragment, where the N-terminal fragment is fused at the C-terminus to a an intein-N and where the C-terminal fragment is fused at the N-terminus to an intein-C.

### Pharmaceutical Compositions

[0377] In some aspects, the present disclosure provides a pharmaceutical composition comprising any of the cells, polynucleotides, vectors, base editors, base editor systems, guide polynucleotides, fusion proteins, complexes, or the fusion protein-guide polynucleotide complexes described herein.

[0378] The pharmaceutical compositions of the present disclosure can be prepared in accordance with known techniques. See, e.g., Remington, The Science And Practice of Pharmacy (21st ed. 2005). In general, the cell, or population thereof is admixed with a suitable carrier prior to administration or storage, and in some embodiments, the pharmaceutical composition further comprises a pharmaceutically acceptable carrier. Suitable pharmaceutically acceptable carriers generally comprise inert substances that aid in administering the pharmaceutical composition to a subject, aid in processing the pharmaceutical compositions into deliverable preparations, or aid in storing the pharmaceutical composition prior to administration. Pharmaceutically acceptable carriers can include agents that can stabilize, optimize or otherwise alter the form, consistency, viscosity, pH, pharmacokinetics, solubility of the formulation. Such agents include buffering agents, wetting agents, emulsifying agents, diluents, encapsulating agents, and skin penetration enhancers. For example, carriers can include, but are not limited to, saline, buffered saline, dextrose, arginine, sucrose, water, glycerol, ethanol, sorbitol, dextran, sodium carboxymethyl cellulose, and combinations thereof.

[0379] In some embodiments, the pharmaceutical composition is formulated for delivery to a subject. Suitable routes of administrating the pharmaceutical composition described herein include, without limitation: topical, subcutaneous, transdermal, intradermal, intralesional, intraarticular, intraperitoneal, intravesical, transmucosal, gingival, intradental, intracochlear, transtympanic, intraorgan, epidural, intrathecal, intramuscular, intravenous, intravascular, intraosseus, periocular, intratumoral, intracerebral, and intracerebroventricular administration.

[0380] In some embodiments, the pharmaceutical composition described herein is administered locally to a diseased site (e.g., a liver). In some embodiments, the pharmaceutical composition described herein is administered to a subject by injection, by means of a catheter, by means of a suppository, or by means of an implant, the implant being of a porous, non-porous, or gelatinous material, including a membrane, such as a sialastic membrane, or a fiber.

[0381] In some embodiments, any of the fusion proteins, gRNAs, and/or complexes described herein are provided as part of a pharmaceutical composition. In some embodiments, the pharmaceutical composition comprises any of the fusion proteins or complexes provided herein.

[0382] In some embodiments pharmaceutical composition comprises a gRNA, a nucleic acid programmable DNA binding protein, a cationic lipid, and a pharmaceutically acceptable excipient. In embodiments, pharmaceutical compositions comprise a lipid nanoparticle and a pharmaceutically acceptable excipient. In embodiments, the lipid nanoparticle contains a gRNA, a base editor, a complex, a base editor system, or a component thereof of the present disclosure, and/or one or more polynucleotides encoding the same. Pharmaceutical compositions can optionally comprise one or more additional therapeutically active substances.

[0383] The compositions, as described above, can be administered in effective amounts. The effective amount will depend upon the mode of administration, the particular condition being treated, and the desired outcome. It may also depend upon the stage of the condition, the age and physical condition of the subject, the nature of concurrent therapy, if any, and like factors well-known to the medical practitioner. For therapeutic applications, it is that amount sufficient to achieve a medically desirable result.

[0384] In some embodiments, compositions in accordance with the present disclosure can be used for treatment of any of a variety of diseases, disorders, and/or conditions.

### Methods of Treatment

[0385] Some aspects of the present disclosure provide methods of treating a subject in need, the method comprising administering to a subject in need an effective therapeutic amount of a pharmaceutical composition as described herein. In particular embodiments, the methods of treatment include administering to a subject in need thereof a lipid nanoparticle containing a base editor system of the disclosure (e.g., a guide RNA and a polynucleotide encoding a base editor) to a subject. In other embodiments, the methods of the disclosure comprise expressing or introducing into a cell a base editor polypeptide and one or more guide RNAs capable of targeting a nucleic acid molecule encoding at least one polypeptide.

[0386] One of ordinary skill in the art would recognize that multiple administrations of the pharmaceutical compositions contemplated in particular embodiments may be required to affect the desired therapy. For example, a composition may be administered to the subject 1, 2, 3, 4, 5, 6, 7, 8, 9, or 10 or more times over a span of 1 week, 2 weeks, 3 weeks, 1 month, 2 months, 3 months, 4 months, 5 months, 6 months, 1 year, 2 years, 5, years, 10 years, or more.

[0387] Administration of the pharmaceutical compositions contemplated herein may be carried out using conventional techniques including, but not limited to, infusion, transfusion, or parenterally. In some embodiments, parenteral administration includes infusing or injecting intravascularly, intravenously, intramuscularly, intraarterially, intrathecally, intratumorally, intradermally, intraperitoneally, transtracheally, subcutaneously, subcuticularly, intraarticularly, subcapsularly, subarachnoidly and intrasternally.

### Kits

[0388] The disclosure provides kits for the treatment of a cardiovascular disease in a subject. In some embodiments, the kit further includes a base editor system or a polynucleotide encoding a base editor system, wherein the base editor polypeptide system a nucleic acid programmable DNA binding protein (napDNAbp), a deaminase, and a guide RNA. In some embodiments, the napDNAbp is Cas9 or Cas12. In some embodiments, the polynucleotide encoding the base editor is a mRNA sequence. In some embodiments, the deaminase is a cytidine deaminase or an adenosine deaminase. In some embodiments, the kit comprises an edited cell and instructions regarding the use of such cell.

[0389] The kits may further comprise written instructions for using a base editor, base editor system and/or edited cell as described herein. In other embodiments, the instructions include at least one of the following: precautions; warnings; clinical studies; and/or references. The instructions may be printed directly on the container (when present), or as a label applied to the container, or as a separate sheet, pamphlet, card, or folder supplied in or with the container. In a further embodiment, a kit comprises instructions in the form of a label or separate insert (package insert) for suitable operational parameters. In yet another embodiment, the kit comprises one or more containers with appropriate positive and negative controls or control samples, to be used as standard(s) for detection, calibration, or normalization. The kit can further comprise a second container comprising a pharmaceutically-acceptable buffer, such as (sterile) phosphate-buffered saline, Ringer's solution, or dextrose solution. It can further include other materials desirable from a commercial and user standpoint, including other buffers, diluents, filters, needles, syringes, and package inserts with instructions for use.

[0390] The practice of embodiments of the present disclosure employs, unless otherwise indicated, conventional techniques of molecular biology (including recombinant techniques), microbiology, cell biology, biochemistry and immunology, which are well within the purview of the skilled artisan. Such techniques are explained fully in the literature, such as, “Molecular Cloning: A Laboratory Manual”, second edition (Sambrook, 1989); “Oligonucleotide Synthesis” (Gait, 1984); “Animal Cell Culture” (Freshney, 1987); “Methods in Enzymology” “Handbook of Experimental Immunology” (Weir, 1996); “Gene Transfer Vectors for Mammalian Cells” (Miller and Calos, 1987); “Current Protocols in Molecular Biology” (Ausubel, 1987); “PCR: The Polymerase Chain Reaction”, (Mullis, 1994); “Current Protocols in Immunology” (Coligan, 1991). These techniques are applicable to the production of the polynucleotides and polypeptides of the disclosure, and, as such, may be considered in making and practicing embodiments of the disclosure. Particularly useful techniques for particular embodiments will be discussed in the sections that follow.

[0391] The following examples are put forth so as to provide those of ordinary skill in the art with a complete disclosure and description of how to make and use the assay, screening, and therapeutic methods of the disclosure, and are not intended to limit the scope of what the inventors regard as their invention.

### EXAMPLES

### Example 1: Base Editing of Lipoprotein(a) (LPA) Polynucleotides to Introduce a Single Nucleotidepolymorphism (SNP) Associate with Reducedserum Levels of LPA and/or Reduced Incidence of Coronary Heart Disease (CHD)

[0392] A number of LPA single nucleotide polymorphisms (SNPs) are known to be associated with reduced incidence of CHD and/or reduced serum levels of LPA in a subject (see FIGS. 2 and 3 and Tables 8 and 9). Such SNPs can be referred to as “protective SNPs.” For example, subjects containing two LPA genes having the SNP chr6:160532610:A>G had reduced serum levels of LPA (−4.46 mg/dL LPA on average) and a reduced risk of CHD diagnosis compared to subjects containing only 1 or 0 genes having the SNP. Accordingly, experiments were undertaken to demonstrate that base editing can be used to introduce these SNPs to an LPA polynucleotide as part of a method to prevent or treat coronary heart disease in a subject.

TABLE 8
LPA single nucleotide polymorphisms (SNPs) associated with reduced serum
levels of LPA and/or reduced coronary heart disease (CHD) risk in a subject.¹

| | | | | | | Association with | |
|---|---|---|---|---|---|---|---|
| | | | | | | CHD risk in | |
| | | | | | | UKBB | |
| | | | Association with | | | Odds | |
| | | | LP(a) level in UKBB | | | Ratio | |
| | | | Beta * | | ALT | CHD | P- |
| | | Protein | (mg/ | P- | allele | (95% | value |
| Target SNP | NGS summary | change | dL | value | count | CI) | CHD |
| chr6:160531784: | 3 guides >35% | missense | −4.58 | 7.59E−116 | 16743 | 1.00 | 0.96 |
| T > C | installation | (Y->C) | | | | (0.94-1.06) | |
| chr6:160532531: | 1 guide >40% | Splice site | −6.13 | 1.35E−03 | 183 | 1.06 | 0.82 |
| C > T | installation with silent | causing | | | | (0.63-1.80) | |
| | bystander | null alleles | | | | | |
| chr6:160548552: | 1 guide >30% | missense | −2.22 | 2.59E−01 | 178 | 1.42 | 0.14 |
| G > A | installation with non- | (S->L) | | | | (0.89-2.29) | |
| | silent bystander | | | | | | |
| chr6:160532610: | 1 guide >65% | missense | −4.46 | 9.33E−122 | 19833 | 0.88 | 4.25E−06 |
| A > G | installation with non- | (L->P) | | | | (0.83-0.93) | |
| | silent bystander | | | | | | |
| chr6:160591049: | 1 guide >40% | missense | −4.52 | 1.09E−01 | 93 | 1.06 | 0.87 |
| A > G | installation with non- | (C->S) | | | | (0.52-2.19) | |
| | silent bystander | | | | | | |
| chr6:160635134: | 1 guide >30% | missense | −4.29 | 2.66E−06 | 643 | 1.10 | 0.53 |
| G > A | installation with non- | (P->L) | | | | (0.82-1.48) | |
| | silent bystander | | | | | | |
| chr6:160547886: | 1 guide >30% | missense | −5.5 | 1.00E−02 | 129 | 0.57 | 0.14 |
| A > G | installation with non- | (V->A) | | | | (0.27-1.20) | |
| | silent bystander | | | | | | |

¹An Odds Ratio for CHD <1 indicates that this SNV is associated with a lower risk of coronary heart disease. A p-value <0.05 indicates that is a significant change.
“UKBB” indicates “United Kingdom Biobank,”
“CHD” indicates “coronary heart disease,” and
“NGS” indicates “next generation sequencing.”

TABLE 9
Effect on serum LP(a) concentrations and coronary heart
disease (CHD) risk in subjects having 0, 1, or 2 LPA
genes containing a chr6: 160532610: A > G SNP.

| Sample in LP(a) test | 0 (n = 219383) | 1 (n = 7851) | 2 (n = 31) |
|---|---|---|---|
| LP(a) (mg/dL) | 15.9 ± 16.7 | 11.5 ± 14.8 | 4.19 ± 3.18 |
| mean ± SD | | | |
| Sample in CHD test | 0 (n = 311634) | 1 (n = 13086) | 2 (n = 152) |
| CHD cases | 37573 (12.1%*) | 1411 (10.8%*) | 15 (9.9%²) |

²Number of CHD cases/total number of participants in the genotype group; Participants with 2 genes containing 2 LPA genes containing a chr6:160532610:A>G SNP genotype are less likely diagnosed with CHD compared to subjects with 1 or 0 genes containing the SNP.

[0393] Base editor systems (see Tables 1A-1 and 1A-2) for introducing protective SNPs to a LPA polynucleotide were evaluated in HEK293T cells. The cells were transfected with a guide RNA molecule having a sequence selected from those listed in Table 1A-1 and an mRNA molecule encoding a base editor listed in Table 1A-2 as being used in combination with the guide RNA molecule. Sequences for the base editors used are provided in Table 2. Target sites and target LPA polynucleotide modifications corresponding to each base editor system are listed in Table 1A-2. Base editing was measured using next generation sequencing. The base editor systems were effective in introducing a protective SNP to an LPA polynucleotide in the HEK293T cells (see, e.g., Table 8).

### Example 2: Base Editing of a Lipoprotein(a) (LPA) Polynucleotide to Disrupt a Splice Site or Introduce a Stop Codon

[0394] One approach for reducing serum concentrations of LPA in a subject to treat or reduce the incidence of coronary heart disease (CHD) in the subject is to reduce expression of LPA in the subject. Accordingly, experiments were undertaken to demonstrate that base editing can be used to introduce a stop codon or disrupt a splice site in an LPA polynucleotide as part of a method to prevent or treat coronary heart disease in a subject.

[0395] Base editor systems (see Tables 1B-1 and 1B-2) for introducing a stop codon or disrupting a splice site in an LPA polynucleotide were evaluated in HEK293T cells. The cells were transfected with a guide RNA molecule having a sequence selected from those listed in Table 1B-1 and an mRNA molecule encoding a base editor listed in Table 1B-2 as being used in combination with the guide RNA molecule (FIG. 4). Sequences for the base editors used are provided in Table 2. Target sites and target LPA polynucleotide modifications corresponding to each base editor system are listed in Table 1B-2. Base editing was measured using next generation sequencing. Of the base editor systems evaluated, 44 showed base editing frequencies in the HEK293T cells of greater than 60%.

### Example 3: Base Editing of a Lipoprotein(a) (LPA) Polynucleotide to Disrupt a Promoter Region

[0396] As noted above, one approach for reducing serum concentrations of LPA in a subject to treat or reduce the incidence of coronary heart disease (CHD) in the subject is to reduce expression of LPA in the subject. Accordingly, experiments were undertaken to demonstrate that base editing can be used to disrupt a promoter region in an LPA polynucleotide as part of a method to prevent or treat coronary heart disease in a subject.

[0397] Base editor systems (see Tables 1C-1 and 1C-2) for disrupting a promoter region in an LPA polynucleotide were evaluated in HEK293T cells. The cells were transfected with a guide RNA molecule having a sequence selected from those listed in Table 1C-1 and an mRNA molecule encoding a base editor listed in Table 1C-2 as being used in combination with the guide RNA molecule (FIG. 5). Sequences for the base editors used are provided in Table 2. Target sites corresponding to each base editor system are listed in Table 1C-2. Base editing was measured using next generation sequencing. Of the base editor systems evaluated, 25 showed base editing frequencies in the HEK293T cells of greater than 50%.

### OTHER EMBODIMENTS

[0398] From the foregoing description, it will be apparent that variations and modifications may be made to the aspects or embodiments described herein to adopt it to various usages and conditions. Such embodiments are also within the scope of the following claims.

[0399] The recitation of a listing of elements in any definition of a variable herein includes definitions of that variable as any single element or combination (or subcombination) of listed elements. The recitation of an embodiment herein includes that embodiment as any single embodiment or in combination with any other embodiments or portions thereof.

[0400] All patents and publications mentioned in this specification are herein incorporated by reference to the same extent as if each independent patent and publication was specifically and individually indicated to be incorporated by reference.

The application's sequence listing, which the Patent Office published only in electronic form, follows.

SEQUENCE LISTING (2017 sequences)

SEQ ID NO: 1 - protein, 167 aa, Escherichia coli
  REGION 1..167: note = misc_feature - TadA*7.10 (ecTadA) polypeptide sequence
MSEVEFSHEYWMRHALTLAKRARDEREVPVGAVLVLNNRVIGEGWNRAIGLHDPTAHAEIMALRQGGLVMQNYRLIDATLYVTFEPCVMCAGAMIHSRIGRVVFGVRNAKTGAAGSLMDVLHYPGMNHRVEITEGILADECAALLCYFFRMPRQVFNAQKKAQSSTD

SEQ ID NO: 2 - DNA, 4092 bp, synthetic construct
  misc_feature 1..4092: note = BhCas12b GGSGGS-ABE8-Xten20at P153 polynucleotide sequence
  misc_feature 1..6: note = Kozak sequence
  misc_feature 7..57: note = Sequence encoding N-terminal nuclear localization signal
  misc_feature 58..513: note = Sequence encoding BhCas12b
  misc_feature 514..531: note = Sequence encoding a linker
  misc_feature 532..1029: note = Sequence encoding TadA*8
  misc_feature 1030..1089: note = Sequence encoding Xten20 linker
  misc_feature 1090..3954: note = Sequence encoding BhCas12b
  misc_feature 3955..4002: note = Sequence encoding C-terminal NLS
  misc_feature 4003..4008: note = Sequence encoding GS linker
  misc_feature 4009..4089: note = Sequence encoding 3x hemagglutinin (HA) tag
  source 1..4092: mol_type = other DNA
gccaccatggccccaaagaagaagcggaaggtcggtatccacggagtcccagcagccgccaccagatccttcatcctgaagatcgagcccaacgaggaagtgaagaaaggcctctggaaaacccacgaggtgctgaaccacggaatcgcctactacatgaatatcctgaagctgatccggcaagaggccatctacgagcaccacgagcaggaccccaagaatcccaagaaggtgtccaaggccgagatccaggccgagctgtgggatttcgtgctgaagatgcagaagtgcaacagcttcacacacgaggtggacaaggacgaggtgttcaacatcctgagagagctgtacgaggaactggtgcccagcagcgtggaaaagaagggcgaagccaaccagctgagcaacaagtttctgtaccctctggtggaccccaacagccagtctggaaagggaacagccagcagcggcagaaagcccagatggtacaacctgaagattgccggcgatcccggaggctctggaggaagctccgaagtcgagttttcccatgagtactggatgagacacgcattgactctcgcaaagagggctcgagatgaacgcgaggtgcccgtgggggcagtactcgtgctcaacaatcgcgtaatcggcgaaggttggaatagggcaatcggactccacgaccccactgcacatgcggaaatcatggcccttcgacagggagggcttgtgatgcagaattatcgactttatgatgcgacgctgtacgtcacgtttgaaccttgcgtaatgtgcgcgggagctatgattcactcccgcattggacgagttgtattcggtgttcgcaacgccaagacgggtgccgcaggttcactgatggacgtgctgcatcatccaggcatgaaccaccgggtagaaatcacagaaggcatattggcggacgaatgtgcggcgctgttgtgtcgtttttttcgcatgcccaggcgggtctttaacgcccagaaaaaagcacaatcctctactgacggctcttctggatctgaaacacctggcacaagcgagagcgccacccctgagagctctggctcctgggaagaagagaagaagaagtgggaagaagataagaaaaaggacccgctggccaagatcctgggcaagctggctgagtacggactgatccctctgttcatcccctacaccgacagcaacgagcccatcgtgaaagaaatcaagtggatggaaaagtcccggaaccagagcgtgcggcggctggataaggacatgttcattcaggccctggaacggttcctgagctgggagagctggaacctgaaagtgaaagaggaatacgagaaggtcgagaaagagtacaagaccctggaagagaggatcaaagaggacatccaggctctgaaggctctggaacagtatgagaaagagcggcaagaacagctgctgcgggacaccctgaacaccaacgagtaccggctgagcaagagaggccttagaggctggcgggaaatcatccagaaatggctgaaaatggacgagaacgagccctccgagaagtacctggaagtgttcaaggactaccagcggaagcaccctagagaggccggcgattacagcgtgtacgagttcctgtccaagaaagagaaccacttcatctggcggaatcaccctgagtacccctacctgtacgccaccttctgcgagatcgacaagaaaaagaaggacgccaagcagcaggccaccttcacactggccgatcctatcaatcaccctctgtgggtccgattcgaggaaagaagcggcagcaacctgaacaagtacagaatcctgaccgagcagctgcacaccgagaagctgaagaaaaagctgacagtgcagctggaccggctgatctaccctacagaatctggcggctgggaagagaagggcaaagtggacattgtgctgctgcccagccggcagttctacaaccagatcttcctggacatcgaggaaaagggcaagcacgccttcacctacaaggatgagagcatcaagttccctctgaagggcacactcggcggagccagagtgcagttcgacagagatcacctgagaagataccctcacaaggtggaaagcggcaacgtgggcagaatctacttcaacatgaccgtgaacatcgagcctacagagtccccagtgtccaagtctctgaagatccaccgggacgacttccccaaggtggtcaacttcaagcccaaagaactgaccgagtggatcaaggacagcaagggcaagaaactgaagtccggcatcgagtccctggaaatcggcctgagagtgatgagcatcgacctgggacagagacaggccgctgccgcctctattttcgaggtggtggatcagaagcccgacatcgaaggcaagctgtttttcccaatcaagggcaccgagctgtatgccgtgcacagagccagcttcaacatcaagctgcccggcgagacactggtcaagagcagagaagtgctgcggaaggccagagaggacaatctgaaactgatgaaccagaagctcaacttcctgcggaacgtgctgcacttccagcagttcgaggacatcaccgagagagagaagcgggtcaccaagtggatcagcagacaagagaacagcgacgtgcccctggtgtaccaggatgagctgatccagatccgcgagctgatgtacaagccttacaaggactgggtcgccttcctgaagcagctccacaagagactggaagtcgagatcggcaaagaagtgaagcactggcggaagtccctgagcgacggaagaaagggcctgtacggcatctccctgaagaacatcgacgagatcgatcggacccggaagttcctgctgagatggtccctgaggcctaccgaacctggcgaagtgcgtagactggaacccggccagagattcgccatcgaccagctgaatcacctgaacgccctgaaagaagatcggctgaagaagatggccaacaccatcatcatgcacgccctgggctactgctacgacgtgcggaagaagaaatggcaggctaagaaccccgcctgccagatcatcctgttcgaggatctgagcaactacaacccctacgaggaaaggtcccgcttcgagaacagcaagctcatgaagtggtccagacgcgagatccccagacaggttgcactgcagggcgagatctatggcctgcaagtgggagaagtgggcgctcagttcagcagcagattccacgccaagacaggcagccctggcatcagatgtagcgtcgtgaccaaagagaagctgcaggacaatcggttcttcaagaatctgcagagagagggcagactgaccctggacaaaatcgccgtgctgaaagagggcgatctgtacccagacaaaggcggcgagaagttcatcagcctgagcaaggatcggaagtgcgtgaccacacacgccgacatcaacgccgctcagaacctgcagaagcggttctggacaagaacccacggcttctacaaggtgtactgcaaggcctaccaggtggacggccagaccgtgtacatccctgagagcaaggaccagaagcagaagatcatcgaagagttcggcgagggctacttcattctgaaggacggggtgtacgaatgggtcaacgccggcaagctgaaaatcaagaagggcagctccaagcagagcagcagcgagctggtggatagcgacatcctgaaagacagcttcgacctggcctccgagctgaaaggcgaaaagctgatgctgtacagggaccccagcggcaatgtgttccccagcgacaaatggatggccgctggcgtgttcttcggaaagctggaacgcatcctgatcagcaagctgaccaaccagtactccatcagcaccatcgaggacgacagcagcaagcagtctatgaaaaggccggcggccacgaaaaaggccggccaggcaaaaaagaaaaagggatcctacccatacgatgttccagattacgcttatccctacgacgtgcctgattatgcatacccatatgatgtccccgactatgcctaa

SEQ ID NO: 3 - protein, 1361 aa, synthetic construct
  REGION 1..1361: note = BhCas12b GGSGGS-ABE8-Xten20at P153 polypeptide sequence
MAPKKKRKVGIHGVPAAATRSFILKIEPNEEVKKGLWKTHEVLNHGIAYYMNILKLIRQEAIYEHHEQDPKNPKKVSKAEIQAELWDFVLKMQKCNSFTHEVDKDEVFNILRELYEELVPSSVEKKGEANQLSNKFLYPLVDPNSQSGKGTASSGRKPRWYNLKIAGDPGGSGGSSEVEFSHEYWMRHALTLAKRARDEREVPVGAVLVLNNRVIGEGWNRAIGLHDPTAHAEIMALRQGGLVMQNYRLYDATLYVTFEPCVMCAGAMIHSRIGRVVFGVRNAKTGAAGSLMDVLHHPGMNHRVEITEGILADECAALLCRFFRMPRRVFNAQKKAQSSTDGSSGSETPGTSESATPESSGSWEEEKKKWEEDKKKDPLAKILGKLAEYGLIPLFIPYTDSNEPIVKEIKWMEKSRNQSVRRLDKDMFIQALERFLSWESWNLKVKEEYEKVEKEYKTLEERIKEDIQALKALEQYEKERQEQLLRDTLNTNEYRLSKRGLRGWREIIQKWLKMDENEPSEKYLEVFKDYQRKHPREAGDYSVYEFLSKKENHFIWRNHPEYPYLYATFCEIDKKKKDAKQQATFTLADPINHPLWVRFEERSGSNLNKYRILTEQLHTEKLKKKLTVQLDRLIYPTESGGWEEKGKVDIVLLPSRQFYNQIFLDIEEKGKHAFTYKDESIKFPLKGTLGGARVQFDRDHLRRYPHKVESGNVGRIYFNMTVNIEPTESPVSKSLKIHRDDFPKVVNFKPKELTEWIKDSKGKKLKSGIESLEIGLRVMSIDLGQRQAAAASIFEVVDQKPDIEGKLFFPIKGTELYAVHRASFNIKLPGETLVKSREVLRKAREDNLKLMNQKLNFLRNVLHFQQFEDITEREKRVTKWISRQENSDVPLVYQDELIQIRELMYKPYKDWVAFLKQLHKRLEVEIGKEVKHWRKSLSDGRKGLYGISLKNIDEIDRTRKFLLRWSLRPTEPGEVRRLEPGQRFAIDQLNHLNALKEDRLKKMANTIIMHALGYCYDVRKKKWQAKNPACQIILFEDLSNYNPYEERSRFENSKLMKWSRREIPRQVALQGEIYGLQVGEVGAQFSSRFHAKTGSPGIRCSVVTKEKLQDNRFFKNLQREGRLTLDKIAVLKEGDLYPDKGGEKFISLSKDRKCVTTHADINAAQNLQKRFWTRTHGFYKVYCKAYQVDGQTVYIPESKDQKQKIIEEFGEGYFILKDGVYEWVNAGKLKIKKGSSKQSSSELVDSDILKDSFDLASELKGEKLMLYRDPSGNVFPSDKWMAAGVFFGKLERILISKLTNQYSISTIEDDSSKQSMKRPAATKKAGQAKKKKGSYPYDVPDYAYPYDVPDYAYPYDVPDYA

SEQ ID NO: 4 - DNA, 4092 bp, synthetic construct
  misc_feature 1..4092: note = BhCas12b GGSGGS-ABE8-Xten20at K255 polynucleotide sequence
  misc_feature 1..6: note = Kozak sequence
  misc_feature 7..57: note = Sequence encoding N-terminal nuclear localization signal (NLS)
  misc_feature 58..822: note = Sequence encoding BhCas12b
  misc_feature 823..840: note = Sequence encoding a linker
  misc_feature 841..1338: note = Sequence encoding TadA*8
  misc_feature 1339..1398: note = Sequence encoding Xten20 linker
  misc_feature 1399..3954: note = Sequence encoding BhCas12b
  misc_feature 3955..4002: note = Sequence encoding C-terminal NLS
  misc_feature 4003..4008: note = Sequence encoding a GS linker
  misc_feature 4009..4089: note = Sequence encoding 3x hemagglutinin (HA) tag
  source 1..4092: mol_type = other DNA
gccaccatggccccaaagaagaagcggaaggtcggtatccacggagtcccagcagccgccaccagatccttcatcctgaagatcgagcccaacgaggaagtgaagaaaggcctctggaaaacccacgaggtgctgaaccacggaatcgcctactacatgaatatcctgaagctgatccggcaagaggccatctacgagcaccacgagcaggaccccaagaatcccaagaaggtgtccaaggccgagatccaggccgagctgtgggatttcgtgctgaagatgcagaagtgcaacagcttcacacacgaggtggacaaggacgaggtgttcaacatcctgagagagctgtacgaggaactggtgcccagcagcgtggaaaagaagggcgaagccaaccagctgagcaacaagtttctgtaccctctggtggaccccaacagccagtctggaaagggaacagccagcagcggcagaaagcccagatggtacaacctgaagattgccggcgatccctcctgggaagaagagaagaagaagtgggaagaagataagaaaaaggacccgctggccaagatcctgggcaagctggctgagtacggactgatccctctgttcatcccctacaccgacagcaacgagcccatcgtgaaagaaatcaagtggatggaaaagtcccggaaccagagcgtgcggcggctggataaggacatgttcattcaggccctggaacggttcctgagctgggagagctggaacctgaaagtgaaagaggaatacgagaaggtcgagaaagagtacaagaccctggaagagaggatcaaaggaggctctggaggaagctccgaagtcgagttttcccatgagtactggatgagacacgcattgactctcgcaaagagggctcgagatgaacgcgaggtgcccgtgggggcagtactcgtgctcaacaatcgcgtaatcggcgaaggttggaatagggcaatcggactccacgaccccactgcacatgcggaaatcatggcccttcgacagggagggcttgtgatgcagaattatcgactttatgatgcgacgctgtacgtcacgtttgaaccttgcgtaatgtgcgcgggagctatgattcactcccgcattggacgagttgtattcggtgttcgcaacgccaagacgggtgccgcaggttcactgatggacgtgctgcatcatccaggcatgaaccaccgggtagaaatcacagaaggcatattggcggacgaatgtgcggcgctgttgtgtcgtttttttcgcatgcccaggcgggtctttaacgcccagaaaaaagcacaatcctctactgacggctcttctggatctgaaacacctggcacaagcgagagcgccacccctgagagctctggcgaggacatccaggctctgaaggctctggaacagtatgagaaagagcggcaagaacagctgctgcgggacaccctgaacaccaacgagtaccggctgagcaagagaggccttagaggctggcgggaaatcatccagaaatggctgaaaatggacgagaacgagccctccgagaagtacctggaagtgttcaaggactaccagcggaagcaccctagagaggccggcgattacagcgtgtacgagttcctgtccaagaaagagaaccacttcatctggcggaatcaccctgagtacccctacctgtacgccaccttctgcgagatcgacaagaaaaagaaggacgccaagcagcaggccaccttcacactggccgatcctatcaatcaccctctgtgggtccgattcgaggaaagaagcggcagcaacctgaacaagtacagaatcctgaccgagcagctgcacaccgagaagctgaagaaaaagctgacagtgcagctggaccggctgatctaccctacagaatctggcggctgggaagagaagggcaaagtggacattgtgctgctgcccagccggcagttctacaaccagatcttcctggacatcgaggaaaagggcaagcacgccttcacctacaaggatgagagcatcaagttccctctgaagggcacactcggcggagccagagtgcagttcgacagagatcacctgagaagataccctcacaaggtggaaagcggcaacgtgggcagaatctacttcaacatgaccgtgaacatcgagcctacagagtccccagtgtccaagtctctgaagatccaccgggacgacttccccaaggtggtcaacttcaagcccaaagaactgaccgagtggatcaaggacagcaagggcaagaaactgaagtccggcatcgagtccctggaaatcggcctgagagtgatgagcatcgacctgggacagagacaggccgctgccgcctctattttcgaggtggtggatcagaagcccgacatcgaaggcaagctgtttttcccaatcaagggcaccgagctgtatgccgtgcacagagccagcttcaacatcaagctgcccggcgagacactggtcaagagcagagaagtgctgcggaaggccagagaggacaatctgaaactgatgaaccagaagctcaacttcctgcggaacgtgctgcacttccagcagttcgaggacatcaccgagagagagaagcgggtcaccaagtggatcagcagacaagagaacagcgacgtgcccctggtgtaccaggatgagctgatccagatccgcgagctgatgtacaagccttacaaggactgggtcgccttcctgaagcagctccacaagagactggaagtcgagatcggcaaagaagtgaagcactggcggaagtccctgagcgacggaagaaagggcctgtacggcatctccctgaagaacatcgacgagatcgatcggacccggaagttcctgctgagatggtccctgaggcctaccgaacctggcgaagtgcgtagactggaacccggccagagattcgccatcgaccagctgaatcacctgaacgccctgaaagaagatcggctgaagaagatggccaacaccatcatcatgcacgccctgggctactgctacgacgtgcggaagaagaaatggcaggctaagaaccccgcctgccagatcatcctgttcgaggatctgagcaactacaacccctacgaggaaaggtcccgcttcgagaacagcaagctcatgaagtggtccagacgcgagatccccagacaggttgcactgcagggcgagatctatggcctgcaagtgggagaagtgggcgctcagttcagcagcagattccacgccaagacaggcagccctggcatcagatgtagcgtcgtgaccaaagagaagctgcaggacaatcggttcttcaagaatctgcagagagagggcagactgaccctggacaaaatcgccgtgctgaaagagggcgatctgtacccagacaaaggcggcgagaagttcatcagcctgagcaaggatcggaagtgcgtgaccacacacgccgacatcaacgccgctcagaacctgcagaagcggttctggacaagaacccacggcttctacaaggtgtactgcaaggcctaccaggtggacggccagaccgtgtacatccctgagagcaaggaccagaagcagaagatcatcgaagagttcggcgagggctacttcattctgaaggacggggtgtacgaatgggtcaacgccggcaagctgaaaatcaagaagggcagctccaagcagagcagcagcgagctggtggatagcgacatcctgaaagacagcttcgacctggcctccgagctgaaaggcgaaaagctgatgctgtacagggaccccagcggcaatgtgttccccagcgacaaatggatggccgctggcgtgttcttcggaaagctggaacgcatcctgatcagcaagctgaccaaccagtactccatcagcaccatcgaggacgacagcagcaagcagtctatgaaaaggccggcggccacgaaaaaggccggccaggcaaaaaagaaaaagggatcctacccatacgatgttccagattacgcttatccctacgacgtgcctgattatgcatacccatatgatgtccccgactatgcctaa

SEQ ID NO: 5 - protein, 1361 aa, synthetic construct
  REGION 1..1361: note = BhCas12b GGSGGS-ABE8-Xten20at K255 polypeptide sequence
MAPKKKRKVGIHGVPAAATRSFILKIEPNEEVKKGLWKTHEVLNHGIAYYMNILKLIRQEAIYEHHEQDPKNPKKVSKAEIQAELWDFVLKMQKCNSFTHEVDKDEVFNILRELYEELVPSSVEKKGEANQLSNKFLYPLVDPNSQSGKGTASSGRKPRWYNLKIAGDPSWEEEKKKWEEDKKKDPLAKILGKLAEYGLIPLFIPYTDSNEPIVKEIKWMEKSRNQSVRRLDKDMFIQALERFLSWESWNLKVKEEYEKVEKEYKTLEERIKGGSGGSSEVEFSHEYWMRHALTLAKRARDEREVPVGAVLVLNNRVIGEGWNRAIGLHDPTAHAEIMALRQGGLVMQNYRLYDATLYVTFEPCVMCAGAMIHSRIGRVVFGVRNAKTGAAGSLMDVLHHPGMNHRVEITEGILADECAALLCRFFRMPRRVFNAQKKAQSSTDGSSGSETPGTSESATPESSGEDIQALKALEQYEKERQEQLLRDTLNTNEYRLSKRGLRGWREIIQKWLKMDENEPSEKYLEVFKDYQRKHPREAGDYSVYEFLSKKENHFIWRNHPEYPYLYATFCEIDKKKKDAKQQATFTLADPINHPLWVRFEERSGSNLNKYRILTEQLHTEKLKKKLTVQLDRLIYPTESGGWEEKGKVDIVLLPSRQFYNQIFLDIEEKGKHAFTYKDESIKFPLKGTLGGARVQFDRDHLRRYPHKVESGNVGRIYFNMTVNIEPTESPVSKSLKIHRDDFPKVVNFKPKELTEWIKDSKGKKLKSGIESLEIGLRVMSIDLGQRQAAAASIFEVVDQKPDIEGKLFFPIKGTELYAVHRASFNIKLPGETLVKSREVLRKAREDNLKLMNQKLNFLRNVLHFQQFEDITEREKRVTKWISRQENSDVPLVYQDELIQIRELMYKPYKDWVAFLKQLHKRLEVEIGKEVKHWRKSLSDGRKGLYGISLKNIDEIDRTRKFLLRWSLRPTEPGEVRRLEPGQRFAIDQLNHLNALKEDRLKKMANTIIMHALGYCYDVRKKKWQAKNPACQIILFEDLSNYNPYEERSRFENSKLMKWSRREIPRQVALQGEIYGLQVGEVGAQFSSRFHAKTGSPGIRCSVVTKEKLQDNRFFKNLQREGRLTLDKIAVLKEGDLYPDKGGEKFISLSKDRKCVTTHADINAAQNLQKRFWTRTHGFYKVYCKAYQVDGQTVYIPESKDQKQKIIEEFGEGYFILKDGVYEWVNAGKLKIKKGSSKQSSSELVDSDILKDSFDLASELKGEKLMLYRDPSGNVFPSDKWMAAGVFFGKLERILISKLTNQYSISTIEDDSSKQSMKRPAATKKAGQAKKKKGSYPYDVPDYAYPYDVPDYAYPYDVPDYA

SEQ ID NO: 6 - DNA, 4092 bp, synthetic construct
  misc_feature 1..4092: note = BhCas12b GGSGGS-ABE8-Xten20at D306 polynucleotide sequence
  misc_feature 1..6: note = Kozak sequence
  misc_feature 7..57: note = Sequence encoding N-terminal nuclear localization signal (NLS)
  misc_feature 58..975: note = Sequence encoding BhCas12b
  misc_feature 976..993: note = Sequence encoding a linker
  misc_feature 994..1491: note = Sequence encoding TadA*8
  misc_feature 1492..1551: note = Sequence encoding Xten20 linker
  misc_feature 1552..3954: note = Sequence encoding BhCas12b
  misc_feature 3955..4002: note = Sequence encoding C-terminal NLS
  misc_feature 4003..4008: note = Sequence encoding a GS linker
  misc_feature 4009..4089: note = Sequence encoding 3x hemagglutinin (HA) tag
  source 1..4092: mol_type = other DNA
gccaccatggccccaaagaagaagcggaaggtcggtatccacggagtcccagcagccgccaccagatccttcatcctgaagatcgagcccaacgaggaagtgaagaaaggcctctggaaaacccacgaggtgctgaaccacggaatcgcctactacatgaatatcctgaagctgatccggcaagaggccatctacgagcaccacgagcaggaccccaagaatcccaagaaggtgtccaaggccgagatccaggccgagctgtgggatttcgtgctgaagatgcagaagtgcaacagcttcacacacgaggtggacaaggacgaggtgttcaacatcctgagagagctgtacgaggaactggtgcccagcagcgtggaaaagaagggcgaagccaaccagctgagcaacaagtttctgtaccctctggtggaccccaacagccagtctggaaagggaacagccagcagcggcagaaagcccagatggtacaacctgaagattgccggcgatccctcctgggaagaagagaagaagaagtgggaagaagataagaaaaaggacccgctggccaagatcctgggcaagctggctgagtacggactgatccctctgttcatcccctacaccgacagcaacgagcccatcgtgaaagaaatcaagtggatggaaaagtcccggaaccagagcgtgcggcggctggataaggacatgttcattcaggccctggaacggttcctgagctgggagagctggaacctgaaagtgaaagaggaatacgagaaggtcgagaaagagtacaagaccctggaagagaggatcaaagaggacatccaggctctgaaggctctggaacagtatgagaaagagcggcaagaacagctgctgcgggacaccctgaacaccaacgagtaccggctgagcaagagaggccttagaggctggcgggaaatcatccagaaatggctgaaaatggacggaggctctggaggaagctccgaagtcgagttttcccatgagtactggatgagacacgcattgactctcgcaaagagggctcgagatgaacgcgaggtgcccgtgggggcagtactcgtgctcaacaatcgcgtaatcggcgaaggttggaatagggcaatcggactccacgaccccactgcacatgcggaaatcatggcccttcgacagggagggcttgtgatgcagaattatcgactttatgatgcgacgctgtacgtcacgtttgaaccttgcgtaatgtgcgcgggagctatgattcactcccgcattggacgagttgtattcggtgttcgcaacgccaagacgggtgccgcaggttcactgatggacgtgctgcatcatccaggcatgaaccaccgggtagaaatcacagaaggcatattggcggacgaatgtgcggcgctgttgtgtcgtttttttcgcatgcccaggcgggtctttaacgcccagaaaaaagcacaatcctctactgacggctcttctggatctgaaacacctggcacaagcgagagcgccacccctgagagctctggcgagaacgagccctccgagaagtacctggaagtgttcaaggactaccagcggaagcaccctagagaggccggcgattacagcgtgtacgagttcctgtccaagaaagagaaccacttcatctggcggaatcaccctgagtacccctacctgtacgccaccttctgcgagatcgacaagaaaaagaaggacgccaagcagcaggccaccttcacactggccgatcctatcaatcaccctctgtgggtccgattcgaggaaagaagcggcagcaacctgaacaagtacagaatcctgaccgagcagctgcacaccgagaagctgaagaaaaagctgacagtgcagctggaccggctgatctaccctacagaatctggcggctgggaagagaagggcaaagtggacattgtgctgctgcccagccggcagttctacaaccagatcttcctggacatcgaggaaaagggcaagcacgccttcacctacaaggatgagagcatcaagttccctctgaagggcacactcggcggagccagagtgcagttcgacagagatcacctgagaagataccctcacaaggtggaaagcggcaacgtgggcagaatctacttcaacatgaccgtgaacatcgagcctacagagtccccagtgtccaagtctctgaagatccaccgggacgacttccccaaggtggtcaacttcaagcccaaagaactgaccgagtggatcaaggacagcaagggcaagaaactgaagtccggcatcgagtccctggaaatcggcctgagagtgatgagcatcgacctgggacagagacaggccgctgccgcctctattttcgaggtggtggatcagaagcccgacatcgaaggcaagctgtttttcccaatcaagggcaccgagctgtatgccgtgcacagagccagcttcaacatcaagctgcccggcgagacactggtcaagagcagagaagtgctgcggaaggccagagaggacaatctgaaactgatgaaccagaagctcaacttcctgcggaacgtgctgcacttccagcagttcgaggacatcaccgagagagagaagcgggtcaccaagtggatcagcagacaagagaacagcgacgtgcccctggtgtaccaggatgagctgatccagatccgcgagctgatgtacaagccttacaaggactgggtcgccttcctgaagcagctccacaagagactggaagtcgagatcggcaaagaagtgaagcactggcggaagtccctgagcgacggaagaaagggcctgtacggcatctccctgaagaacatcgacgagatcgatcggacccggaagttcctgctgagatggtccctgaggcctaccgaacctggcgaagtgcgtagactggaacccggccagagattcgccatcgaccagctgaatcacctgaacgccctgaaagaagatcggctgaagaagatggccaacaccatcatcatgcacgccctgggctactgctacgacgtgcggaagaagaaatggcaggctaagaaccccgcctgccagatcatcctgttcgaggatctgagcaactacaacccctacgaggaaaggtcccgcttcgagaacagcaagctcatgaagtggtccagacgcgagatccccagacaggttgcactgcagggcgagatctatggcctgcaagtgggagaagtgggcgctcagttcagcagcagattccacgccaagacaggcagccctggcatcagatgtagcgtcgtgaccaaagagaagctgcaggacaatcggttcttcaagaatctgcagagagagggcagactgaccctggacaaaatcgccgtgctgaaagagggcgatctgtacccagacaaaggcggcgagaagttcatcagcctgagcaaggatcggaagtgcgtgaccacacacgccgacatcaacgccgctcagaacctgcagaagcggttctggacaagaacccacggcttctacaaggtgtactgcaaggcctaccaggtggacggccagaccgtgtacatccctgagagcaaggaccagaagcagaagatcatcgaagagttcggcgagggctacttcattctgaaggacggggtgtacgaatgggtcaacgccggcaagctgaaaatcaagaagggcagctccaagcagagcagcagcgagctggtggatagcgacatcctgaaagacagcttcgacctggcctccgagctgaaaggcgaaaagctgatgctgtacagggaccccagcggcaatgtgttccccagcgacaaatggatggccgctggcgtgttcttcggaaagctggaacgcatcctgatcagcaagctgaccaaccagtactccatcagcaccatcgaggacgacagcagcaagcagtctatgaaaaggccggcggccacgaaaaaggccggccaggcaaaaaagaaaaagggatcctacccatacgatgttccagattacgcttatccctacgacgtgcctgattatgcatacccatatgatgtccccgactatgcctaa

SEQ ID NO: 7 - protein, 1361 aa, synthetic construct
  REGION 1..1361: note = BhCas12b GGSGGS-ABE8-Xten20at D306 polypeptide sequence
MAPKKKRKVGIHGVPAAATRSFILKIEPNEEVKKGLWKTHEVLNHGIAYYMNILKLIRQEAIYEHHEQDPKNPKKVSKAEIQAELWDFVLKMQKCNSFTHEVDKDEVFNILRELYEELVPSSVEKKGEANQLSNKFLYPLVDPNSQSGKGTASSGRKPRWYNLKIAGDPSWEEEKKKWEEDKKKDPLAKILGKLAEYGLIPLFIPYTDSNEPIVKEIKWMEKSRNQSVRRLDKDMFIQALERFLSWESWNLKVKEEYEKVEKEYKTLEERIKEDIQALKALEQYEKERQEQLLRDTLNTNEYRLSKRGLRGWREIIQKWLKMDGGSGGSSEVEFSHEYWMRHALTLAKRARDEREVPVGAVLVLNNRVIGEGWNRAIGLHDPTAHAEIMALRQGGLVMQNYRLYDATLYVTFEPCVMCAGAMIHSRIGRVVFGVRNAKTGAAGSLMDVLHHPGMNHRVEITEGILADECAALLCRFFRMPRRVFNAQKKAQSSTDGSSGSETPGTSESATPESSGENEPSEKYLEVFKDYQRKHPREAGDYSVYEFLSKKENHFIWRNHPEYPYLYATFCEIDKKKKDAKQQATFTLADPINHPLWVRFEERSGSNLNKYRILTEQLHTEKLKKKLTVQLDRLIYPTESGGWEEKGKVDIVLLPSRQFYNQIFLDIEEKGKHAFTYKDESIKFPLKGTLGGARVQFDRDHLRRYPHKVESGNVGRIYFNMTVNIEPTESPVSKSLKIHRDDFPKVVNFKPKELTEWIKDSKGKKLKSGIESLEIGLRVMSIDLGQRQAAAASIFEVVDQKPDIEGKLFFPIKGTELYAVHRASFNIKLPGETLVKSREVLRKAREDNLKLMNQKLNFLRNVLHFQQFEDITEREKRVTKWISRQENSDVPLVYQDELIQIRELMYKPYKDWVAFLKQLHKRLEVEIGKEVKHWRKSLSDGRKGLYGISLKNIDEIDRTRKFLLRWSLRPTEPGEVRRLEPGQRFAIDQLNHLNALKEDRLKKMANTIIMHALGYCYDVRKKKWQAKNPACQIILFEDLSNYNPYEERSRFENSKLMKWSRREIPRQVALQGEIYGLQVGEVGAQFSSRFHAKTGSPGIRCSVVTKEKLQDNRFFKNLQREGRLTLDKIAVLKEGDLYPDKGGEKFISLSKDRKCVTTHADINAAQNLQKRFWTRTHGFYKVYCKAYQVDGQTVYIPESKDQKQKIIEEFGEGYFILKDGVYEWVNAGKLKIKKGSSKQSSSELVDSDILKDSFDLASELKGEKLMLYRDPSGNVFPSDKWMAAGVFFGKLERILISKLTNQYSISTIEDDSSKQSMKRPAATKKAGQAKKKKGSYPYDVPDYAYPYDVPDYAYPYDVPDYA

SEQ ID NO: 8 - DNA, 4092 bp, synthetic construct
  misc_feature 1..4092: note = BhCas12b GGSGGS-ABE8-Xten20at D980 polynucleotide sequence
  misc_feature 1..6: note = Kozak sequence
  misc_feature 7..57: note = Sequence encoding N-terminal nuclear localization signal (NLS)
  misc_feature 58..2997: note = Sequence encoding BhCas12b
  misc_feature 2998..3015: note = Sequence encoding a linker
  misc_feature 3016..3513: note = Sequence encoding TadA*8
  misc_feature 3514..3573: note = Sequence encoding Xten20 linker
  misc_feature 3574..3954: note = Sequence encoding BhCas12b
  misc_feature 3955..4002: note = Sequence encoding C-terminal NLS
  misc_feature 4003..4008: note = Sequence encoding a GS linker
  misc_feature 4009..4089: note = Sequence encoding 3x hemagglutinin (HA) tag
  source 1..4092: mol_type = other DNA
gccaccatggccccaaagaagaagcggaaggtcggtatccacggagtcccagcagccgccaccagatccttcatcctgaagatcgagcccaacgaggaagtgaagaaaggcctctggaaaacccacgaggtgctgaaccacggaatcgcctactacatgaatatcctgaagctgatccggcaagaggccatctacgagcaccacgagcaggaccccaagaatcccaagaaggtgtccaaggccgagatccaggccgagctgtgggatttcgtgctgaagatgcagaagtgcaacagcttcacacacgaggtggacaaggacgaggtgttcaacatcctgagagagctgtacgaggaactggtgcccagcagcgtggaaaagaagggcgaagccaaccagctgagcaacaagtttctgtaccctctggtggaccccaacagccagtctggaaagggaacagccagcagcggcagaaagcccagatggtacaacctgaagattgccggcgatccctcctgggaagaagagaagaagaagtgggaagaagataagaaaaaggacccgctggccaagatcctgggcaagctggctgagtacggactgatccctctgttcatcccctacaccgacagcaacgagcccatcgtgaaagaaatcaagtggatggaaaagtcccggaaccagagcgtgcggcggctggataaggacatgttcattcaggccctggaacggttcctgagctgggagagctggaacctgaaagtgaaagaggaatacgagaaggtcgagaaagagtacaagaccctggaagagaggatcaaagaggacatccaggctctgaaggctctggaacagtatgagaaagagcggcaagaacagctgctgcgggacaccctgaacaccaacgagtaccggctgagcaagagaggccttagaggctggcgggaaatcatccagaaatggctgaaaatggacgagaacgagccctccgagaagtacctggaagtgttcaaggactaccagcggaagcaccctagagaggccggcgattacagcgtgtacgagttcctgtccaagaaagagaaccacttcatctggcggaatcaccctgagtacccctacctgtacgccaccttctgcgagatcgacaagaaaaagaaggacgccaagcagcaggccaccttcacactggccgatcctatcaatcaccctctgtgggtccgattcgaggaaagaagcggcagcaacctgaacaagtacagaatcctgaccgagcagctgcacaccgagaagctgaagaaaaagctgacagtgcagctggaccggctgatctaccctacagaatctggcggctgggaagagaagggcaaagtggacattgtgctgctgcccagccggcagttctacaaccagatcttcctggacatcgaggaaaagggcaagcacgccttcacctacaaggatgagagcatcaagttccctctgaagggcacactcggcggagccagagtgcagttcgacagagatcacctgagaagataccctcacaaggtggaaagcggcaacgtgggcagaatctacttcaacatgaccgtgaacatcgagcctacagagtccccagtgtccaagtctctgaagatccaccgggacgacttccccaaggtggtcaacttcaagcccaaagaactgaccgagtggatcaaggacagcaagggcaagaaactgaagtccggcatcgagtccctggaaatcggcctgagagtgatgagcatcgacctgggacagagacaggccgctgccgcctctattttcgaggtggtggatcagaagcccgacatcgaaggcaagctgtttttcccaatcaagggcaccgagctgtatgccgtgcacagagccagcttcaacatcaagctgcccggcgagacactggtcaagagcagagaagtgctgcggaaggccagagaggacaatctgaaactgatgaaccagaagctcaacttcctgcggaacgtgctgcacttccagcagttcgaggacatcaccgagagagagaagcgggtcaccaagtggatcagcagacaagagaacagcgacgtgcccctggtgtaccaggatgagctgatccagatccgcgagctgatgtacaagccttacaaggactgggtcgccttcctgaagcagctccacaagagactggaagtcgagatcggcaaagaagtgaagcactggcggaagtccctgagcgacggaagaaagggcctgtacggcatctccctgaagaacatcgacgagatcgatcggacccggaagttcctgctgagatggtccctgaggcctaccgaacctggcgaagtgcgtagactggaacccggccagagattcgccatcgaccagctgaatcacctgaacgccctgaaagaagatcggctgaagaagatggccaacaccatcatcatgcacgccctgggctactgctacgacgtgcggaagaagaaatggcaggctaagaaccccgcctgccagatcatcctgttcgaggatctgagcaactacaacccctacgaggaaaggtcccgcttcgagaacagcaagctcatgaagtggtccagacgcgagatccccagacaggttgcactgcagggcgagatctatggcctgcaagtgggagaagtgggcgctcagttcagcagcagattccacgccaagacaggcagccctggcatcagatgtagcgtcgtgaccaaagagaagctgcaggacaatcggttcttcaagaatctgcagagagagggcagactgaccctggacaaaatcgccgtgctgaaagagggcgatctgtacccagacaaaggcggcgagaagttcatcagcctgagcaaggatcggaagtgcgtgaccacacacgccgacatcaacgccgctcagaacctgcagaagcggttctggacaagaacccacggcttctacaaggtgtactgcaaggcctaccaggtggacggaggctctggaggaagctccgaagtcgagttttcccatgagtactggatgagacacgcattgactctcgcaaagagggctcgagatgaacgcgaggtgcccgtgggggcagtactcgtgctcaacaatcgcgtaatcggcgaaggttggaatagggcaatcggactccacgaccccactgcacatgcggaaatcatggcccttcgacagggagggcttgtgatgcagaattatcgactttatgatgcgacgctgtacgtcacgtttgaaccttgcgtaatgtgcgcgggagctatgattcactcccgcattggacgagttgtattcggtgttcgcaacgccaagacgggtgccgcaggttcactgatggacgtgctgcatcatccaggcatgaaccaccgggtagaaatcacagaaggcatattggcggacgaatgtgcggcgctgttgtgtcgtttttttcgcatgcccaggcgggtctttaacgcccagaaaaaagcacaatcctctactgacggctcttctggatctgaaacacctggcacaagcgagagcgccacccctgagagctctggcggccagaccgtgtacatccctgagagcaaggaccagaagcagaagatcatcgaagagttcggcgagggctacttcattctgaaggacggggtgtacgaatgggtcaacgccggcaagctgaaaatcaagaagggcagctccaagcagagcagcagcgagctggtggatagcgacatcctgaaagacagcttcgacctggcctccgagctgaaaggcgaaaagctgatgctgtacagggaccccagcggcaatgtgttccccagcgacaaatggatggccgctggcgtgttcttcggaaagctggaacgcatcctgatcagcaagctgaccaaccagtactccatcagcaccatcgaggacgacagcagcaagcagtctatgaaaaggccggcggccacgaaaaaggccggccaggcaaaaaagaaaaagggatcctacccatacgatgttccagattacgcttatccctacgacgtgcctgattatgcatacccatatgatgtccccgactatgcctaa

SEQ ID NO: 9 - protein, 1361 aa, synthetic construct
  REGION 1..1361: note = BhCas12b GGSGGS-ABE8-Xten20at D980 polypeptide sequence
MAPKKKRKVGIHGVPAAATRSFILKIEPNEEVKKGLWKTHEVLNHGIAYYMNILKLIRQEAIYEHHEQDPKNPKKVSKAEIQAELWDFVLKMQKCNSFTHEVDKDEVFNILRELYEELVPSSVEKKGEANQLSNKFLYPLVDPNSQSGKGTASSGRKPRWYNLKIAGDPSWEEEKKKWEEDKKKDPLAKILGKLAEYGLIPLFIPYTDSNEPIVKEIKWMEKSRNQSVRRLDKDMFIQALERFLSWESWNLKVKEEYEKVEKEYKTLEERIKEDIQALKALEQYEKERQEQLLRDTLNTNEYRLSKRGLRGWREIIQKWLKMDENEPSEKYLEVFKDYQRKHPREAGDYSVYEFLSKKENHFIWRNHPEYPYLYATFCEIDKKKKDAKQQATFTLADPINHPLWVRFEERSGSNLNKYRILTEQLHTEKLKKKLTVQLDRLIYPTESGGWEEKGKVDIVLLPSRQFYNQIFLDIEEKGKHAFTYKDESIKFPLKGTLGGARVQFDRDHLRRYPHKVESGNVGRIYFNMTVNIEPTESPVSKSLKIHRDDFPKVVNFKPKELTEWIKDSKGKKLKSGIESLEIGLRVMSIDLGQRQAAAASIFEVVDQKPDIEGKLFFPIKGTELYAVHRASFNIKLPGETLVKSREVLRKAREDNLKLMNQKLNFLRNVLHFQQFEDITEREKRVTKWISRQENSDVPLVYQDELIQIRELMYKPYKDWVAFLKQLHKRLEVEIGKEVKHWRKSLSDGRKGLYGISLKNIDEIDRTRKFLLRWSLRPTEPGEVRRLEPGQRFAIDQLNHLNALKEDRLKKMANTIIMHALGYCYDVRKKKWQAKNPACQIILFEDLSNYNPYEERSRFENSKLMKWSRREIPRQVALQGEIYGLQVGEVGAQFSSRFHAKTGSPGIRCSVVTKEKLQDNRFFKNLQREGRLTLDKIAVLKEGDLYPDKGGEKFISLSKDRKCVTTHADINAAQNLQKRFWTRTHGFYKVYCKAYQVDGGSGGSSEVEFSHEYWMRHALTLAKRARDEREVPVGAVLVLNNRVIGEGWNRAIGLHDPTAHAEIMALRQGGLVMQNYRLYDATLYVTFEPCVMCAGAMIHSRIGRVVFGVRNAKTGAAGSLMDVLHHPGMNHRVEITEGILADECAALLCRFFRMPRRVFNAQKKAQSSTDGSSGSETPGTSESATPESSGGQTVYIPESKDQKQKIIEEFGEGYFILKDGVYEWVNAGKLKIKKGSSKQSSSELVDSDILKDSFDLASELKGEKLMLYRDPSGNVFPSDKWMAAGVFFGKLERILISKLTNQYSISTIEDDSSKQSMKRPAATKKAGQAKKKKGSYPYDVPDYAYPYDVPDYAYPYDVPDYA

SEQ ID NO: 10 - DNA, 4092 bp, synthetic construct
  misc_feature 1..4092: note = BhCas12b GGSGGS-ABE8-Xten20at K1019 polynucleotide sequence
  misc_feature 1..6: note = Kozak sequence
  misc_feature 7..57: note = Sequence encoding N-terminal nuclear localization signal (NLS)
  misc_feature 58..3114: note = Sequence encoding BhCas12b
  misc_feature 3115..3132: note = Sequence encoding a linker
  misc_feature 3133..3630: note = Sequence encoding TadA*8
  misc_feature 3631..3690: note = Sequence encoding Xten20 linker
  misc_feature 3691..3954: note = Sequence encoding BhCas12b
  misc_feature 3955..4002: note = Sequence encoding C-terminal NLS
  misc_feature 4003..4008: note = Sequence encoding GS linker
  misc_feature 4009..4089: note = Sequence encoding 3x hemagglutinin (HA) tag
  source 1..4092: mol_type = other DNA
gccaccatggccccaaagaagaagcggaaggtcggtatccacggagtcccagcagccgccaccagatccttcatcctgaagatcgagcccaacgaggaagtgaagaaaggcctctggaaaacccacgaggtgctgaaccacggaatcgcctactacatgaatatcctgaagctgatccggcaagaggccatctacgagcaccacgagcaggaccccaagaatcccaagaaggtgtccaaggccgagatccaggccgagctgtgggatttcgtgctgaagatgcagaagtgcaacagcttcacacacgaggtggacaaggacgaggtgttcaacatcctgagagagctgtacgaggaactggtgcccagcagcgtggaaaagaagggcgaagccaaccagctgagcaacaagtttctgtaccctctggtggaccccaacagccagtctggaaagggaacagccagcagcggcagaaagcccagatggtacaacctgaagattgccggcgatccctcctgggaagaagagaagaagaagtgggaagaagataagaaaaaggacccgctggccaagatcctgggcaagctggctgagtacggactgatccctctgttcatcccctacaccgacagcaacgagcccatcgtgaaagaaatcaagtggatggaaaagtcccggaaccagagcgtgcggcggctggataaggacatgttcattcaggccctggaacggttcctgagctgggagagctggaacctgaaagtgaaagaggaatacgagaaggtcgagaaagagtacaagaccctggaagagaggatcaaagaggacatccaggctctgaaggctctggaacagtatgagaaagagcggcaagaacagctgctgcgggacaccctgaacaccaacgagtaccggctgagcaagagaggccttagaggctggcgggaaatcatccagaaatggctgaaaatggacgagaacgagccctccgagaagtacctggaagtgttcaaggactaccagcggaagcaccctagagaggccggcgattacagcgtgtacgagttcctgtccaagaaagagaaccacttcatctggcggaatcaccctgagtacccctacctgtacgccaccttctgcgagatcgacaagaaaaagaaggacgccaagcagcaggccaccttcacactggccgatcctatcaatcaccctctgtgggtccgattcgaggaaagaagcggcagcaacctgaacaagtacagaatcctgaccgagcagctgcacaccgagaagctgaagaaaaagctgacagtgcagctggaccggctgatctaccctacagaatctggcggctgggaagagaagggcaaagtggacattgtgctgctgcccagccggcagttctacaaccagatcttcctggacatcgaggaaaagggcaagcacgccttcacctacaaggatgagagcatcaagttccctctgaagggcacactcggcggagccagagtgcagttcgacagagatcacctgagaagataccctcacaaggtggaaagcggcaacgtgggcagaatctacttcaacatgaccgtgaacatcgagcctacagagtccccagtgtccaagtctctgaagatccaccgggacgacttccccaaggtggtcaacttcaagcccaaagaactgaccgagtggatcaaggacagcaagggcaagaaactgaagtccggcatcgagtccctggaaatcggcctgagagtgatgagcatcgacctgggacagagacaggccgctgccgcctctattttcgaggtggtggatcagaagcccgacatcgaaggcaagctgtttttcccaatcaagggcaccgagctgtatgccgtgcacagagccagcttcaacatcaagctgcccggcgagacactggtcaagagcagagaagtgctgcggaaggccagagaggacaatctgaaactgatgaaccagaagctcaacttcctgcggaacgtgctgcacttccagcagttcgaggacatcaccgagagagagaagcgggtcaccaagtggatcagcagacaagagaacagcgacgtgcccctggtgtaccaggatgagctgatccagatccgcgagctgatgtacaagccttacaaggactgggtcgccttcctgaagcagctccacaagagactggaagtcgagatcggcaaagaagtgaagcactggcggaagtccctgagcgacggaagaaagggcctgtacggcatctccctgaagaacatcgacgagatcgatcggacccggaagttcctgctgagatggtccctgaggcctaccgaacctggcgaagtgcgtagactggaacccggccagagattcgccatcgaccagctgaatcacctgaacgccctgaaagaagatcggctgaagaagatggccaacaccatcatcatgcacgccctgggctactgctacgacgtgcggaagaagaaatggcaggctaagaaccccgcctgccagatcatcctgttcgaggatctgagcaactacaacccctacgaggaaaggtcccgcttcgagaacagcaagctcatgaagtggtccagacgcgagatccccagacaggttgcactgcagggcgagatctatggcctgcaagtgggagaagtgggcgctcagttcagcagcagattccacgccaagacaggcagccctggcatcagatgtagcgtcgtgaccaaagagaagctgcaggacaatcggttcttcaagaatctgcagagagagggcagactgaccctggacaaaatcgccgtgctgaaagagggcgatctgtacccagacaaaggcggcgagaagttcatcagcctgagcaaggatcggaagtgcgtgaccacacacgccgacatcaacgccgctcagaacctgcagaagcggttctggacaagaacccacggcttctacaaggtgtactgcaaggcctaccaggtggacggccagaccgtgtacatccctgagagcaaggaccagaagcagaagatcatcgaagagttcggcgagggctacttcattctgaaggacggggtgtacgaatgggtcaacgccggcaagggaggctctggaggaagctccgaagtcgagttttcccatgagtactggatgagacacgcattgactctcgcaaagagggctcgagatgaacgcgaggtgcccgtgggggcagtactcgtgctcaacaatcgcgtaatcggcgaaggttggaatagggcaatcggactccacgaccccactgcacatgcggaaatcatggcccttcgacagggagggcttgtgatgcagaattatcgactttatgatgcgacgctgtacgtcacgtttgaaccttgcgtaatgtgcgcgggagctatgattcactcccgcattggacgagttgtattcggtgttcgcaacgccaagacgggtgccgcaggttcactgatggacgtgctgcatcatccaggcatgaaccaccgggtagaaatcacagaaggcatattggcggacgaatgtgcggcgctgttgtgtcgtttttttcgcatgcccaggcgggtctttaacgcccagaaaaaagcacaatcctctactgacggctcttctggatctgaaacacctggcacaagcgagagcgccacccctgagagctctggcctgaaaatcaagaagggcagctccaagcagagcagcagcgagctggtggatagcgacatcctgaaagacagcttcgacctggcctccgagctgaaaggcgaaaagctgatgctgtacagggaccccagcggcaatgtgttccccagcgacaaatggatggccgctggcgtgttcttcggaaagctggaacgcatcctgatcagcaagctgaccaaccagtactccatcagcaccatcgaggacgacagcagcaagcagtctatgaaaaggccggcggccacgaaaaaggccggccaggcaaaaaagaaaaagggatcctacccatacgatgttccagattacgcttatccctacgacgtgcctgattatgcatacccatatgatgtccccgactatgcctaa

SEQ ID NO: 11 - protein, 1361 aa, synthetic construct
  REGION 1..1361: note = BhCas12b GGSGGS-ABE8-Xten20at K1019 polypeptide sequence
MAPKKKRKVGIHGVPAAATRSFILKIEPNEEVKKGLWKTHEVLNHGIAYYMNILKLIRQEAIYEHHEQDPKNPKKVSKAEIQAELWDFVLKMQKCNSFTHEVDKDEVFNILRELYEELVPSSVEKKGEANQLSNKFLYPLVDPNSQSGKGTASSGRKPRWYNLKIAGDPSWEEEKKKWEEDKKKDPLAKILGKLAEYGLIPLFIPYTDSNEPIVKEIKWMEKSRNQSVRRLDKDMFIQALERFLSWESWNLKVKEEYEKVEKEYKTLEERIKEDIQALKALEQYEKERQEQLLRDTLNTNEYRLSKRGLRGWREIIQKWLKMDENEPSEKYLEVFKDYQRKHPREAGDYSVYEFLSKKENHFIWRNHPEYPYLYATFCEIDKKKKDAKQQATFTLADPINHPLWVRFEERSGSNLNKYRILTEQLHTEKLKKKLTVQLDRLIYPTESGGWEEKGKVDIVLLPSRQFYNQIFLDIEEKGKHAFTYKDESIKFPLKGTLGGARVQFDRDHLRRYPHKVESGNVGRIYFNMTVNIEPTESPVSKSLKIHRDDFPKVVNFKPKELTEWIKDSKGKKLKSGIESLEIGLRVMSIDLGQRQAAAASIFEVVDQKPDIEGKLFFPIKGTELYAVHRASFNIKLPGETLVKSREVLRKAREDNLKLMNQKLNFLRNVLHFQQFEDITEREKRVTKWISRQENSDVPLVYQDELIQIRELMYKPYKDWVAFLKQLHKRLEVEIGKEVKHWRKSLSDGRKGLYGISLKNIDEIDRTRKFLLRWSLRPTEPGEVRRLEPGQRFAIDQLNHLNALKEDRLKKMANTIIMHALGYCYDVRKKKWQAKNPACQIILFEDLSNYNPYEERSRFENSKLMKWSRREIPRQVALQGEIYGLQVGEVGAQFSSRFHAKTGSPGIRCSVVTKEKLQDNRFFKNLQREGRLTLDKIAVLKEGDLYPDKGGEKFISLSKDRKCVTTHADINAAQNLQKRFWTRTHGFYKVYCKAYQVDGQTVYIPESKDQKQKIIEEFGEGYFILKDGVYEWVNAGKGGSGGSSEVEFSHEYWMRHALTLAKRARDEREVPVGAVLVLNNRVIGEGWNRAIGLHDPTAHAEIMALRQGGLVMQNYRLYDATLYVTFEPCVMCAGAMIHSRIGRVVFGVRNAKTGAAGSLMDVLHHPGMNHRVEITEGILADECAALLCRFFRMPRRVFNAQKKAQSSTDGSSGSETPGTSESATPESSGLKIKKGSSKQSSSELVDSDILKDSFDLASELKGEKLMLYRDPSGNVFPSDKWMAAGVFFGKLERILISKLTNQYSISTIEDDSSKQSMKRPAATKKAGQAKKKKGSYPYDVPDYAYPYDVPDYAYPYDVPDYA

SEQ ID NO: 12 - protein, 208 aa, Petromyzon marinus
  REGION 1..208: note = MISC_FEATURE - tr|A5H718|A5H718_PETMA Cytosine deaminase OS=Petromyzon marinusOX=7757 PE=2 SV=1 amino acid sequence; PmCDA1 polypeptide sequence
MTDAEYVRIHEKLDIYTFKKQFFNNKKSVSHRCYVLFELKRRGERRACFWGYAVNKPQSGTERGIHAEIFSIRKVEEYLRDNPGQFTINWYSSWSPCADCAEKILEWYNQELRGNGHTLKIWACKLYYEKNARNQIGLWNLRDNGVGLNVMVSEHYQCCRKIFIQSSHNQLNENRWLEKTLKRAEKRRSELSIMIQVKILHTTKSPAV

SEQ ID NO: 13 - DNA, 766 bp, Petromyzon marinus
  misc_feature 1..766: note = EF094822.1 Petromyzon marinus isolate PmCDA.21 cytosine deaminase mRNA, complete cds; PmCDA1 polynucleotide sequence
  source 1..766: mol_type = genomic DNA
tgacacgacacagccgtgtatatgaggaagggtagctggatggggggggggggaatacgttcagagaggacattagcgagcgtcttgttggtggccttgagtctagacacctgcagacatgaccgacgctgagtacgtgagaatccatgagaagttggacatctacacgtttaagaaacagtttttcaacaacaaaaaatccgtgtcgcatagatgctacgttctctttgaattaaaacgacggggtgaacgtagagcgtgtttttggggctatgctgtgaataaaccacagagcgggacagaacgtggaattcacgccgaaatctttagcattagaaaagtcgaagaatacctgcgcgacaaccccggacaattcacgataaattggtactcatcctggagtccttgtgcagattgcgctgaaaagatcttagaatggtataaccaggagctgcgggggaacggccacactttgaaaatctgggcttgcaaactctattacgagaaaaatgcgaggaatcaaattgggctgtggaacctcagagataacggggttgggttgaatgtaatggtaagtgaacactaccaatgttgcaggaaaatattcatccaatcgtcgcacaatcaattgaatgagaatagatggcttgagaagactttgaagcgagctgaaaaacgacggagcgagttgtccattatgattcaggtaaaaatactccacaccactaagagtcctgctgtttaagaggctatgcggatggttttc

SEQ ID NO: 14 - protein, 145 aa, Homo sapiens
  REGION 1..145: note = MISC_FEATURE - tr|Q6QJ80|Q6QJ80_HUMAN Activation-induced cytidine deaminase OS=Homo sapiens; OX = 9606 GN=AICDA PE=2 SV=1; AID polypeptide sequence
MDSLLMNRRKFLYQFKNVRWAKGRRETYLCYVVKRRDSATSFSLDFGYLRNKNGCHVELLFLRYISDWDLDPGRCYRVTWFTSWSPCYDCARHVADFLRGNPNLSLRIFTARLYFCEDRKAEPEGLRRLHRAGVQIAIMTFKAPV

SEQ ID NO: 15 - DNA, 10681 bp, Homo sapiens
  misc_feature 1..10681: note = NG_011588.1:5001-15681 Homo sapiens activation induced cytidine deaminase (AICDA), RefSeqGene (LRG_17) on chromosome 12; nucleic acid sequence of the CDS of human AID; polynucleotide sequence
  source 1..10681: mol_type = genomic DNA
agagaaccatcattaattgaagtgagatttttctggcctgagacttgcagggaggcaagaagacactctggacaccactatggacaggtaaagaggcagtcttctcgtgggtgattgcactggccttcctctcagagcaaatctgagtaatgagactggtagctatccctttctctcatgtaactgtctgactgataagatcagcttgatcaatatgcatatatattttttgatctgtctccttttcttctattcagatcttatacgctgtcagcccaattctttctgtttcagacttctcttgatttccctctttttcatgtggcaaaagaagtagtgcgtacaatgtactgattcgtcctgagatttgtaccatggttgaaactaatttatggtaataatattaacatagcaaatctttagagactcaaatcatgaaaaggtaatagcagtactgtactaaaaacggtagtgctaattttcgtaataattttgtaaatattcaacagtaaaacaacttgaagacacactttcctagggaggcgttactgaaataatttagctatagtaagaaaatttgtaattttagaaatgccaagcattctaaattaattgcttgaaagtcactatgattgtgtccattataaggagacaaattcattcaagcaagttatttaatgttaaaggcccaattgttaggcagttaatggcacttttactattaactaatctttccatttgttcagacgtagcttaacttacctcttaggtgtgaatttggttaaggtcctcataatgtctttatgtgcagtttttgataggttattgtcatagaacttattctattcctacatttatgattactatggatgtatgagaataacacctaatccttatactttacctcaatttaactcctttataaagaacttacattacagaataaagattttttaaaaatatatttttttgtagagacagggtcttagcccagccgaggctggtctctaagtcctggcccaagcgatcctcctgcctgggcctcctaaagtgctggaattatagacatgagccatcacatccaatatacagaataaagatttttaatggaggatttaatgttcttcagaaaattttcttgaggtcagacaatgtcaaatgtctcctcagtttacactgagattttgaaaacaagtctgagctataggtccttgtgaagggtccattggaaatacttgttcaaagtaaaatggaaagcaaaggtaaaatcagcagttgaaattcagagaaagacagaaaaggagaaaagatgaaattcaacaggacagaagggaaatatattatcattaaggaggacagtatctgtagagctcattagtgatggcaaaatgacttggtcaggattatttttaacccgcttgtttctggtttgcacggctggggatgcagctagggttctgcctcagggagcacagctgtccagagcagctgtcagcctgcaagcctgaaacactccctcggtaaagtccttcctactcaggacagaaatgacgagaacagggagctggaaacaggcccctaaccagagaagggaagtaatggatcaacaaagttaactagcaggtcaggatcacgcaattcatttcactctgactggtaacatgtgacagaaacagtgtaggcttattgtattttcatgtagagtaggacccaaaaatccacccaaagtcctttatctatgccacatccttcttatctatacttccaggacactttttcttccttatgataaggctctctctctctccacacacacacacacacacacacacacacacacacacacacacacaaacacacaccccgccaaccaaggtgcatgtaaaaagatgtagattcctctgcctttctcatctacacagcccaggagggtaagttaatataagagggatttattggtaagagatgatgcttaatctgtttaacactgggcctcaaagagagaatttcttttcttctgtacttattaagcacctattatgtgttgagcttatatatacaaagggttattatatgctaatatagtaatagtaatggtggttggtactatggtaattaccataaaaattattatccttttaaaataaagctaattattattggatcttttttagtattcattttatgttttttatgtttttgattttttaaaagacaatctcaccctgttacccaggctggagtgcagtggtgcaatcatagctttctgcagtcttgaactcctgggctcaagcaatcctcctgccttggcctcccaaagtgttgggatacagtcatgagccactgcatctggcctaggatccatttagattaaaatatgcattttaaattttaaaataatatggctaatttttaccttatgtaatgtgtatactggcaataaatctagtttgctgcctaaagtttaaagtgctttccagtaagcttcatgtacgtgaggggagacatttaaagtgaaacagacagccaggtgtggtggctcacgcctgtaatcccagcactctgggaggctgaggtgggtggatcgcttgagccctggagttcaagaccagcctgagcaacatggcaaaacgctgtttctataacaaaaattagccgggcatggtggcatgtgcctgtggtcccagctactagggggctgaggcaggagaatcgttggagcccaggaggtcaaggctgcactgagcagtgcttgcgccactgcactccagcctgggtgacaggaccagaccttgcctcaaaaaaataagaagaaaaattaaaaataaatggaaacaactacaaagagctgttgtcctagatgagctacttagttaggctgatattttggtatttaacttttaaagtcagggtctgtcacctgcactacattattaaaatatcaattctcaatgtatatccacacaaagactggtacgtgaatgttcatagtacctttattcacaaaaccccaaagtagagactatccaaatatccatcaacaagtgaacaaataaacaaaatgtgctatatccatgcaatggaataccaccctgcagtacaaagaagctacttggggatgaatcccaaagtcatgacgctaaatgaaagagtcagacatgaaggaggagataatgtatgccatacgaaattctagaaaatgaaagtaacttatagttacagaaagcaaatcagggcaggcatagaggctcacacctgtaatcccagcactttgagaggccacgtgggaagattgctagaactcaggagttcaagaccagcctgggcaacacagtgaaactccattctccacaaaaatgggaaaaaaagaaagcaaatcagtggttgtcctgtggggaggggaaggactgcaaagagggaagaagctctggtggggtgagggtggtgattcaggttctgtatcctgactgtggtagcagtttggggtgtttacatccaaaaatattcgtagaattatgcatcttaaatgggtggagtttactgtatgtaaattatacctcaatgtaagaaaaaataatgtgtaagaaaactttcaattctcttgccagcaaacgttattcaaattcctgagccctttacttcgcaaattctctgcacttctgccccgtaccattaggtgacagcactagctccacaaattggataaatgcatttctggaaaagactagggacaaaatccaggcatcacttgtgctttcatatcaaccatgctgtacagcttgtgttgctgtctgcagctgcaatggggactcttgatttctttaaggaaacttgggttaccagagtatttccacaaatgctattcaaattagtgcttatgatatgcaagacactgtgctaggagccagaaaacaaagaggaggagaaatcagtcattatgtgggaacaacatagcaagatatttagatcattttgactagttaaaaaagcagcagagtacaaaatcacacatgcaatcagtataatccaaatcatgtaaatatgtgcctgtagaaagactagaggaataaacacaagaatcttaacagtcattgtcattagacactaagtctaattattattattagacactatgatatttgagatttaaaaaatctttaatattttaaaatttagagctcttctatttttccatagtattcaagtttgacaatgatcaagtattactctttctttttttttttttttttttttttttgagatggagttttggtcttgttgcccatgctggagtggaatggcatgaccatagctcactgcaacctccacctcctgggttcaagcaaagctgtcgcctcagcctcccgggtagatgggattacaggcgcccaccaccacactcggctaatgtttgtatttttagtagagatggggtttcaccatgttggccaggctggtctcaaactcctgacctcagaggatccacctgcctcagcctcccaaagtgctgggattacagatgtaggccactgcgcccggccaagtattgctcttatacattaaaaaacaggtgtgagccactgcgcccagccaggtattgctcttatacattaaaaaataggccggtgcagtggctcacgcctgtaatcccagcactttgggaagccaaggcgggcagaacacccgaggtcaggagtccaaggccagcctggccaagatggtgaaaccccgtctctattaaaaatacaaacattacctgggcatgatggtgggcgcctgtaatcccagctactcaggaggctgaggcaggaggatccgcggagcctggcagatctgcctgagcctgggaggttgaggctacagtaagccaagatcatgccagtatacttcagcctgggcgacaaagtgagaccgtaacaaaaaaaaaaaaatttaaaaaaagaaatttagatcaagatccaactgtaaaaagtggcctaaacaccacattaaagagtttggagtttattctgcaggcagaagagaaccatcagggggtcttcagcatgggaatggcatggtgcacctggtttttgtgagatcatggtggtgacagtgtggggaatgttattttggagggactggaggcagacagaccggttaaaaggccagcacaacagataaggaggaagaagatgagggcttggaccgaagcagagaagagcaaacagggaaggtacaaattcaagaaatattggggggtttgaatcaacacatttagatgattaattaaatatgaggactgaggaataagaaatgagtcaaggatggttccaggctgctaggctgcttacctgaggtggcaaagtcgggaggagtggcagtttaggacagggggcagttgaggaatattgttttgatcattttgagtttgaggtacaagttggacacttaggtaaagactggaggggaaatctgaatatacaattatgggactgaggaacaagtttattttattttttgtttcgttttcttgttgaagaacaaatttaattgtaatcccaagtcatcagcatctagaagacagtggcaggaggtgactgtcttgtgggtaagggtttggggtccttgatgagtatctctcaattggccttaaatataagcaggaaaaggagtttatgatggattccaggctcagcagggctcaggagggctcaggcagccagcagaggaagtcagagcatcttctttggtttagcccaagtaatgacttccttaaaaagctgaaggaaaatccagagtgaccagattataaactgtactcttgcattttctctccctcctctcacccacagcctcttgatgaaccggaggaagtttctttaccaattcaaaaatgtccgctgggctaagggtcggcgtgagacctacctgtgctacgtagtgaagaggcgtgacagtgctacatccttttcactggactttggttatcttcgcaataaggtatcaattaaagtcggctttgcaagcagtttaatggtcaactgtgagtgcttttagagccacctgctgatggtattacttccatccttttttggcatttgtgtctctatcacattcctcaaatccttttttttatttctttttccatgtccatgcacccatattagacatggcccaaaatatgtgatttaattcctccccagtaatgctgggcaccctaataccactccttccttcagtgccaagaacaactgctcccaaactgtttaccagctttcctcagcatctgaattgcctttgagattaattaagctaaaagcatttttatatgggagaatattatcagcttgtccaagcaaaaattttaaatgtgaaaaacaaattgtgtcttaagcatttttgaaaattaaggaagaagaatttgggaaaaaattaacggtggctcaattctgtcttccaaatgatttcttttccctcctactcacatgggtcgtaggccagtgaatacattcaacatggtgatccccagaaaactcagagaagcctcggctgatgattaattaaattgatctttcggctacccgagagaattacatttccaagagacttcttcaccaaaatccagatgggtttacataaacttctgcccacgggtatctcctctctcctaacacgctgtgacgtctgggcttggtggaatctcagggaagcatccgtggggtggaaggtcatcgtctggctcgttgtttgatggttatattaccatgcaattttctttgcctacatttgtattgaatacatcccaatctccttcctattcggtgacatgacacattctatttcagaaggctttgattttatcaagcactttcatttacttctcatggcagtgcctattacttctcttacaatacccatctgtctgctttaccaaaatctatttccccttttcagatcctcccaaatggtcctcataaactgtcctgcctccacctagtggtccaggtatatttccacaatgttacatcaacaggcacttctagccattttccttctcaaaaggtgcaaaaagcaacttcataaacacaaattaaatcttcggtgaggtagtgtgatgctgcttcctcccaactcagcgcacttcgtcttcctcattccacaaaaacccatagccttccttcactctgcaggactagtgctgccaagggttcagctctacctactggtgtgctcttttgagcaagttgcttagcctctctgtaacacaaggacaatagctgcaagcatccccaaagatcattgcaggagacaatgactaaggctaccagagccgcaataaaagtcagtgaattttagcgtggtcctctctgtctctccagaacggctgccacgtggaattgctcttcctccgctacatctcggactgggacctagaccctggccgctgctaccgcgtcacctggttcacctcctggagcccctgctacgactgtgcccgacatgtggccgactttctgcgagggaaccccaacctcagtctgaggatcttcaccgcgcgcctctacttctgtgaggaccgcaaggctgagcccgaggggctgcggcggctgcaccgcgccggggtgcaaatagccatcatgaccttcaaaggtgcgaaagggccttccgcgcaggcgcagtgcagcagcccgcattcgggattgcgatgcggaatgaatgagttagtggggaagctcgaggggaagaagtgggcggggattctggttcacctctggagccgaaattaaagattagaagcagagaaaagagtgaatggctcagagacaaggccccgaggaaatgagaaaatggggccagggttgcttctttcccctcgatttggaacctgaactgtcttctacccccatatccccgcctttttttcctttttttttttttgaagattatttttactgctggaatacttttgtagaaaaccacgaaagaactttcaaagcctgggaagggctgcatgaaaattcagttcgtctctccagacagcttcggcgcatccttttggtaaggggcttcctcgctttttaaattttctttctttctctacagtcttttttggagtttcgtatatttcttatattttcttattgttcaatcactctcagttttcatctgatgaaaactttatttctcctccacatcagctttttcttctgctgtttcaccattcagagccctctgctaaggttccttttccctcccttttctttcttttgttgtttcacatctttaaatttctgtctctccccagggttgcgtttccttcctggtcagaattcttttctcctttttttttttttttttttttttttttaaacaaacaaacaaaaaacccaaaaaaactctttcccaatttactttcttccaacatgttacaaagccatccactcagtttagaagactctccggccccaccgacccccaacctcgttttgaagccattcactcaatttgcttctctctttctctacagcccctgtatgaggttgatgacttacgagacgcatttcgtactttgggactttgatagcaacttccaggaatgtcacacacgatgaaatatctctgctgaagacagtggataaaaaacagtccttcaagtcttctctgtttttattcttcaactctcactttcttagagtttacagaaaaaatatttatatacgactctttaaaaagatctatgtcttgaaaatagagaaggaacacaggtctggccagggacgtgctgcaattggtgcagttttgaatgcaacattgtcccctactgggaataacagaactgcaggacctgggagcatcctaaagtgtcaacgtttttctatgacttttaggtaggatgagagcagaaggtagatcctaaaaagcatggtgagaggatcaaatgtttttatatcaacatcctttattatttgattcatttgagttaacagtggtgttagtgatagatttttctattcttttcccttgacgtttactttcaagtaacacaaactcttccatcaggccatgatctataggacctcctaatgagagtatctgggtgattgtgaccccaaaccatctctccaaagcattaatatccaatcatgcgctgtatgttttaatcagcagaagcatgtttttatgtttgtacaaaagaagattgttatgggtggggatggaggtatagaccatgcatggtcaccttcaagctactttaataaaggatcttaaaatgggcaggaggactgtgaacaagacaccctaataatgggttgatgtctgaagtagcaaatcttctggaaacgcaaactcttttaaggaagtccctaatttagaaacacccacaaacttcacatatcataattagcaaacaattggaaggaagttgcttgaatgttggggagaggaaaatctattggctctcgtgggtctcttcatctcagaaatgccaatcaggtcaaggtttgctacattttgtatgtgtgtgatgcttctcccaaaggtatattaactatataagagagttgtgacaaaacagaatgataaagctgcgaaccgtggcacacgctcatagttctagctgcttgggaggttgaggagggaggatggcttgaacacaggtgttcaaggccagcctgggcaacataacaagatcctgtctctcaaaaaaaaaaaaaaaaaaaagaaagagagagggccgggcgtggtggctcacgcctgtaatcccagcactttgggaggccgagccgggcggatcacctgtggtcaggagtttgagaccagcctggccaacatggcaaaaccccgtctgtactcaaaatgcaaaaattagccaggcgtggtagcaggcacctgtaatcccagctacttgggaggctgaggcaggagaatcgcttgaacccaggaggtggaggttgcagtaagctgagatcgtgccgttgcactccagcctgggcgacaagagcaagactctgtctcagaaaaaaaaaaaaaaaagagagagagagagaaagagaacaatatttgggagagaaggatggggaagcattgcaaggaaattgtgctttatccaacaaaatgtaaggagccaataagggatccctatttgtctcttttggtgtctatttgtccctaacaactgtctttgacagtgagaaaaatattcagaataaccatatccctgtgccgttattacctagcaacccttgcaatgaagatgagcagatccacaggaaaacttgaatgcacaactgtcttattttaatcttattgtacataagtttgtaaaagagttaaaaattgttacttcatgtattcatttatattttatattattttgcgtctaatgattttttattaacatgatttccttttctgatatattgaaatggagtctcaaagcttcataaatttataactttagaaatgattctaataacaacgtatgtaattgtaacattgcagtaatggtgctacgaagccatttctcttgatttttagtaaacttttatgacagcaaatttgcttctggctcactttcaatcagttaaataaatgataaataattttggaagctgtgaagataaaataccaaataaaataatataaaagtgatttatatgaagttaaaataaaaaatcagtatgatggaataaacttg

SEQ ID NO: 16 - protein, 198 aa, Homo sapiens [sequence omitted]

SEQ ID NO: 17 - protein, 198 aa, Canis lupus
  REGION 1..198: note = MISC_FEATURE - Canine AID (clAID) polypeptide sequence
  REGION 1..30: note = MISC_FEATURE - Nuclear localization sequence
  REGION 183..198: note = MISC_FEATURE - Nuclear export signal
MDSLLMKQRKFLYHFKNVRWAKGRHETYLCYVVKRRDSATSFSLDFGHLRNKSGCHVELLFLRYISDWDLDPGRCYRVTWFTSWSPCYDCARHVADFLRGYPNLSLRIFAARLYFCEDRKAEPEGLRRLHRAGVQIAIMTFKDYFYCWNTFVENREKTFKAWEGLHENSVRLSRQLRRILLPLYEVDDLRDAFRTLGL

SEQ ID NO: 18 - protein, 199 aa, Bos taurus
  REGION 1..199: note = MISC_FEATURE - Bovine AID (btAID) polypeptide sequence
  REGION 1..30: note = MISC_FEATURE - Nuclear localization sequence
  REGION 183..199: note = MISC_FEATURE - Nuclear export signal
MDSLLKKQRQFLYQFKNVRWAKGRHETYLCYVVKRRDSPTSFSLDFGHLRNKAGCHVELLFLRYISDWDLDPGRCYRVTWFTSWSPCYDCARHVADFLRGYPNLSLRIFTARLYFCDKERKAEPEGLRRLHRAGVQIAIMTFKDYFYCWNTFVENHERTFKAWEGLHENSVRLSRQLRRILLPLYEVDDLRDAFRTLGL

SEQ ID NO: 19 - protein, 239 aa, Rattus sp.
  REGION 1..239: note = MISC_FEATURE - Rat AID polypeptide sequence
  REGION 1..26: note = MISC_FEATURE - Nuclear localization sequence
  REGION 194..239: note = MISC_FEATURE - Nuclear export signal
MAVGSKPKAALVGPHWERERIWCFLCSTGLGTQQTGQTSRWLRPAATQDPVSPPRSLLMKQRKFLYHFKNVRWAKGRHETYLCYVVKRRDSATSFSLDFGYLRNKSGCHVELLFLRYISDWDLDPGRCYRVTWFTSWSPCYDCARHVADFLRGNPNLSLRIFTARLTGWGALPAGLMSPARPSDYFYCWNTFVENHERTFKAWEGLHENSVRLSRRLRRILLPLYEVDDLRDAFRTLGL

SEQ ID NO: 20 - protein, 198 aa, Mus musculus [sequence omitted]

SEQ ID NO: 21 - protein, 229 aa, Rattus norvegicus [sequence omitted]

SEQ ID NO: 22 - protein, 229 aa, Mesocricetus auratus
  REGION 1..229: note = MISC_FEATURE - maAPOBEC-1 polypeptide sequence
MSSETGPVVVDPTLRRRIEPHEFDAFFDQGELRKETCLLYEIRWGGRHNIWRHTGQNTSRHVEINFIEKFTSERYFYPSTRCSIVWFLSWSPCGECSKAITEFLSGHPNVTLFIYAARLYHHTDQRNRQGLRDLISRGVTIRIMTEQEYCYCWRNFVNYPPSNEVYWPRYPNLWMRLYALELYCIHLGLPPCLKIKRRHQYPLTFFRLNLQSCHYQRIPPHILWATGFI

SEQ ID NO: 23 - protein, 236 aa, Pongo pygmaeus
  REGION 1..236: note = MISC_FEATURE - ppAPOBEC-1 polypeptide sequence
MTSEKGPSTGDPTLRRRIESWEFDVFYDPRELRKETCLLYEIKWGMSRKIWRSSGKNTTNHVEVNFIKKFTSERRFHSSISCSITWFLSWSPCWECSQAIREFLSQHPGVTLVIYVARLFWHMDQRNRQGLRDLVNSGVTIQIMRASEYYHCWRNFVNYPPGDEAHWPQYPPLWMMLYALELHCIILSLPPCLKISRRWQNHLAFFRLHLQNCHYQTIPPHILLATGLIHPSVTWR

SEQ ID NO: 24 - protein, 236 aa, Oryctolagus cuniculus
  REGION 1..236: note = MISC_FEATURE - ocAPOBEC1 polypeptide sequence
MASEKGPSNKDYTLRRRIEPWEFEVFFDPQELRKEACLLYEIKWGASSKTWRSSGKNTTNHVEVNFLEKLTSEGRLGPSTCCSITWFLSWSPCWECSMAIREFLSQHPGVTLIIFVARLFQHMDRRNRQGLKDLVTSGVTVRVMSVSEYCYCWENFVNYPPGKAAQWPRYPPRWMLMYALELYCIILGLPPCLKISRRHQKQLTFFSLTPQYCHYKMIPPYILLATGLLQPSVPWR

SEQ ID NO: 25 - protein, 235 aa, Monodelphis domestica
  REGION 1..235: note = MISC_FEATURE - mdAPOBEC-1 polypeptide sequence
MNSKTGPSVGDATLRRRIKPWEFVAFFNPQELRKETCLLYEIKWGNQNIWRHSNQNTSQHAEINFMEKFTAERHFNSSVRCSITWFLSWSPCWECSKAIRKFLDHYPNVTLAIFISRLYWHMDQQHRQGLKELVHSGVTIQIMSYSEYHYCWRNFVDYPQGEEDYWPKYPYLWIMLYVLELHCIILGLPPCLKISGSHSNQLALFSLDLQDCHYQKIPYNVLVATGLVQPFVTWR

SEQ ID NO: 26 - protein, 224 aa, Pongo pygmaeus
  REGION 1..224: note = MISC_FEATURE - ppAPOBEC-2 polypeptide sequence
MAQKEEAAAATEAASQNGEDLENLDDPEKLKELIELPPFEIVTGERLPANFFKFQFRNVEYSSGRNKTFLCYVVEAQGKGGQVQASRGYLEDEHAAAHAEEAFFNTILPAFDPALRYNVTWYVSSSPCAACADRIIKTLSKTKNLRLLILVGRLFMWEELEIQDALKKLKEAGCKLRIMKPQDFEYVWQNFVEQEEGESKAFQPWEDIQENFLYYEEKLADILK

SEQ ID NO: 27 - protein, 224 aa, Bos taurus
  REGION 1..224: note = MISC_FEATURE - btAPOBEC-2 polypeptide sequence
MAQKEEAAAAAEPASQNGEEVENLEDPEKLKELIELPPFEIVTGERLPAHYFKFQFRNVEYSSGRNKTFLCYVVEAQSKGGQVQASRGYLEDEHATNHAEEAFFNSIMPTFDPALRYMVTWYVSSSPCAACADRIVKTLNKTKNLRLLILVGRLFMWEEPEIQAALRKLKEAGCRLRIMKPQDFEYIWQNFVEQEEGESKAFEPWEDIQENFLYYEEKLADILK

SEQ ID NO: 28 - protein, 440 aa, Mus musculus
  REGION 1..440: note = MISC_FEATURE - mAPOBEC-3-(1) polypeptide sequence
MQPQRLGPRAGMGPFCLGCSHRKCYSPIRNLISQETFKFHFKNLGYAKGRKDTFLCYEVTRKDCDSPVSLHHGVFKNKDNIHAEICFLYWFHDKVLKVLSPREEFKITWYMSWSPCFECAEQIVRFLATHHNLSLDIFSSRLYNVQDPETQQNLCRLVQEGAQVAAMDLYEFKKCWKKFVDNGGRRFRPWKRLLTNFRYQDSKLQEILRPCYISVPSSSSSTLSNICLTKGLPETRFWVEGRRMDPLSEEEFYSQFYNQRVKHLCYYHRMKPYLCYQLEQFNGQAPLKGCLLSEKGKQHAEILFLDKIRSMELSQVTITCYLTWSPCPNCAWQLAAFKRDRPDLILHIYTSRLYFHWKRPFQKGLCSLWQSGILVDVMDLPQFTDCWTNFVNPKRPFWPWKGLEIISRRTQRRLRRIKESWGLQDLVNDFGNLQLGPPMS

SEQ ID NO: 29 - protein, 429 aa, Mus musculus
  REGION 1..429: note = MISC_FEATURE - APOBEC-3-(2) (Mouse APOBEC-3) polypeptide sequence
  REGION 71..108: note = MISC_FEATURE - Nucleic acid editing domain
  REGION 288..319: note = MISC_FEATURE - Nucleic acid editing domain
MGPFCLGCSHRKCYSPIRNLISQETFKFHFKNLGYAKGRKDTFLCYEVTRKDCDSPVSLHHGVFKNKDNIHAEICFLYWFHDKVLKVLSPREEFKITWYMSWSPCFECAEQIVRFLATHHNLSLDIFSSRLYNVQDPETQQNLCRLVQEGAQVAAMDLYEFKKCWKKFVDNGGRRFRPWKRLLTNFRYQDSKLQEILRPCYIPVPSSSSSTLSNICLTKGLPETRFCVEGRRMDPLSEEEFYSQFYNQRVKHLCYYHRMKPYLCYQLEQFNGQAPLKGCLLSEKGKQHAEILFLDKIRSMELSQVTITCYLTWSPCPNCAWQLAAFKRDRPDLILHIYTSRLYFHWKRPFQKGLCSLWQSGILVDVMDLPQFTDCWTNFVNPKRPFWPWKGLEIISRRTQRRLRRIKESWGLQDLVNDFGNLQLGPPMS

SEQ ID NO: 30 - protein, 430 aa, Rattus sp.
  REGION 1..430: note = MISC_FEATURE - APOBEC-3 polypeptide sequence
  REGION 72..109: note = MISC_FEATURE - Nucleic acid editing domain
  REGION 289..320: note = MISC_FEATURE - Nucleic acid editing domain
MGPFCLGCSHRKCYSPIRNLISQETFKFHFKNRLRYAIDRKDTFLCYEVTRKDCDSPVSLHHGVFKNKDNIHAEICFLYWFHDKVLKVLSPREEFKITWYMSWSPCFECAEQVLRFLATHHNLSLDIFSSRLYNIRDPENQQNLCRLVQEGAQVAAMDLYEFKKCWKKFVDNGGRRFRPWKKLLTNFRYQDSKLQEILRPCYIPVPSSSSSTLSNICLTKGLPETRFCVERRRVHLLSEEEFYSQFYNQRVKHLCYYHGVKPYLCYQLEQFNGQAPLKGCLLSEKGKQHAEILFLDKIRSMELSQVIITCYLTWSPCPNCAWQLAAFKRDRPDLILHIYTSRLYFHWKRPFQKGLCSLWQSGILVDVMDLPQFTDCWTNFVNPKRPFWPWKGLEIISRRTQRRLHRIKESWGLQDLVNDFGNLQLGPPMS

SEQ ID NO: 31 - protein, 199 aa, Homo sapiens
  REGION 1..199: note = MISC_FEATURE - hAPOBEC-3A polypeptide sequence
  REGION 70..106: note = MISC_FEATURE - Nucleic acid editing domain
MEASPASGPRHLMDPHIFTSNFNNGIGRHKTYLCYEVERLDNGTSVKMDQHRGFLHNQAKNLLCGFYGRHAELRFLDLVPSLQLDPAQIYRVTWFISWSPCFSWGCAGEVRAFLQENTHVRLRIFAARIYDYDPLYKEALQMLRDAGAQVSIMTYDEFKHCWDTFVDHQGCPFQPWDGLDEHSQALSGRLRAILQNQGN

SEQ ID NO: 32 - protein, 373 aa, Homo sapiens
  REGION 1..373: note = MISC_FEATURE - hAPOBEC-3F polypeptide sequence
  REGION 65..99: note = MISC_FEATURE - Nucleic acid editing domain
  REGION 248..283: note = MISC_FEATURE - Nucleic acid editing domain
MKPHFRNTVERMYRDTFSYNFYNRPILSRRNTVWLCYEVKTKGPSRPRLDAKIFRGQVYSQPEHHAEMCFLSWFCGNQLPAYKCFQITWFVSWTPCPDCVAKLAEFLAEHPNVTLTISAARLYYYWERDYRRALCRLSQAGARVKIMDDEEFAYCWENFVYSEGQPFMPWYKFDDNYAFLHRTLKEILRNPMEAMYPHIFYFHFKNLRKAYGRNESWLCFTMEVVKHHSPVSWKRGVFRNQVDPETHCHAERCFLSWFCDDILSPNTNYEVTWYTSWSPCPECAGEVAEFLARHSNVNLTIFTARLYYFWDTDYQEGLRSLSQEGASVEIMGYKDFKYCWENFVYNDDEPFKPWKGLKYNFLFLDSKLQEILE

SEQ ID NO: 33 - protein, 370 aa, Macaca mulatta
  REGION 1..370: note = MISC_FEATURE - Rhesus macaque APOBEC-3G polypeptide sequence
  REGION 1..61: note = MISC_FEATURE - Cytoplasmic localization signal
MVEPMDPRTFVSNFNNRPILSGLNTVWLCCEVKTKDPSGPPLDAKIFQGKVYSKAKYHPEMRFLRWFHKWRQLHHDQEYKVTWYVSWSPCTRCANSVATFLAKDPKVTLTIFVARLYYFWKPDYQQALRILCQKRGGPHATMKIMNYNEFQDCWNKFVDGRGKPFKPRNNLPKHYTLLQATLGELLRHLMDPGTFTSNFNNKPWVSGQHETYLCYKVERLHNDTWVPLNQHRGFLRNQAPNIHGFPKGRHAELCFLDLIPFWKLDGQQYRVTCFTSWSPCFSCAQEMAKFISNNEHVSLCIFAARIYDDQGRYQEGLRALHRDGAKIAMMNYSEFEYCWDTFVDRQGRPFQPWDGLDEHSQALSGRLRAI

SEQ ID NO: 34 - protein, 384 aa, Pan troglodytes
  REGION 1..384: note = MISC_FEATURE - Chimpanzee APOBEC-3G polypeptide sequence
  REGION 1..60: note = MISC_FEATURE - Cytoplasmic localization signal
  REGION 65..100: note = MISC_FEATURE - Nucleic acid editing domain
  REGION 257..291: note = MISC_FEATURE - Nucleic acid editing domain
MKPHFRNPVERMYQDTFSDNFYNRPILSHRNTVWLCYEVKTKGPSRPPLDAKIFRGQVYSKLKYHPEMRFFHWFSKWRKLHRDQEYEVTWYISWSPCTKCTRDVATFLAEDPKVTLTIFVARLYYFWDPDYQEALRSLCQKRDGPRATMKIMNYDEFQHCWSKFVYSQRELFEPWNNLPKYYILLHIMLGEILRHSMDPPTFTSNFNNELWVRGRHETYLCYEVERLHNDTWVLLNQRRGFLCNQAPHKHGFLEGRHAELCFLDVIPFWKLDLHQDYRVTCFTSWSPCFSCAQEMAKFISNNKHVSLCIFAARIYDDQGRCQEGLRTLAKAGAKISIMTYSEFKHCWDTFVDHQGCPFQPWDGLEEHSQALSGRLRAILQNQGN

SEQ ID NO: 35 - protein, 377 aa, Chlorocebus sabaeus
  REGION 1..377: note = MISC_FEATURE - Green monkey APOBEC-3G polypeptide sequence
  REGION 1..60: note = MISC_FEATURE - Cytoplasmic localization signal
  REGION 65..100: note = MISC_FEATURE - Nucleic acid editing domain
  REGION 257..290: note = MISC_FEATURE - Nucleic acid editing domain
MNPQIRNMVEQMEPDIFVYYFNNRPILSGRNTVWLCYEVKTKDPSGPPLDANIFQGKLYPEAKDHPEMKFLHWFRKWRQLHRDQEYEVTWYVSWSPCTRCANSVATFLAEDPKVTLTIFVARLYYFWKPDYQQALRILCQERGGPHATMKIMNYNEFQHCWNEFVDGQGKPFKPRKNLPKHYTLLHATLGELLRHVMDPGTFTSNFNNKPWVSGQRETYLCYKVERSHNDTWVLLNQHRGFLRNQAPDRHGFPKGRHAELCFLDLIPFWKLDDQQYRVTCFTSWSPCFSCAQKMAKFISNNKHVSLCIFAARIYDDQGRCQEGLRTLHRDGAKIAVMNYSEFEYCWDTFVDRQGRPFQPWDGLDEHSQALSGRLRAI

SEQ ID NO: 36 - protein, 384 aa, Homo sapiens
  REGION 1..384: note = MISC_FEATURE - Human APOBEC-3G polypeptide sequence
  REGION 1..60: note = MISC_FEATURE - Cytoplasmic localization signal
  REGION 65..100: note = MISC_FEATURE - Nucleic acid editing domain
  REGION 257..291: note = MISC_FEATURE - Nucleic acid editing domain
MKPHFRNTVERMYRDTFSYNFYNRPILSRRNTVWLCYEVKTKGPSRPPLDAKIFRGQVYSELKYHPEMRFFHWFSKWRKLHRDQEYEVTWYISWSPCTKCTRDMATFLAEDPKVTLTIFVARLYYFWDPDYQEALRSLCQKRDGPRATMKIMNYDEFQHCWSKFVYSQRELFEPWNNLPKYYILLHIMLGEILRHSMDPPTFTFNFNNEPWVRGRHETYLCYEVERMHNDTWVLLNQRRGFLCNQAPHKHGFLEGRHAELCFLDVIPFWKLDLDQDYRVTCFTSWSPCFSCAQEMAKFISKNKHVSLCIFTARIYDDQGRCQEGLRTLAEAGAKISIMTYSEFKHCWDTFVDHQGCPFQPWDGLDEHSQDLSGRLRAILQNQEN

SEQ ID NO: 37 - protein, 382 aa, Homo sapiens
  REGION 1..382: note = MISC_FEATURE - Human APOBEC-3B polypeptide sequence
  REGION 66..100: note = MISC_FEATURE - Nucleic acid editing domain
  REGION 251..289: note = MISC_FEATURE - Nucleic acid editing domain
MNPQIRNPMERMYRDTFYDNFENEPILYGRSYTWLCYEVKIKRGRSNLLWDTGVFRGQVYFKPQYHAEMCFLSWFCGNQLPAYKCFQITWFVSWTPCPDCVAKLAEFLSEHPNVTLTISAARLYYYWERDYRRALCRLSQAGARVTIMDYEEFAYCWENFVYNEGQQFMPWYKFDENYAFLHRTLKEILRYLMDPDTFTFNFNNDPLVLRRRQTYLCYEVERLDNGTWVLMDQHMGFLCNEAKNLLCGFYGRHAELRFLDLVPSLQLDPAQIYRVTWFISWSPCFSWGCAGEVRAFLQENTHVRLRIFAARIYDYDPLYKEALQMLRDAGAQVSIMTYDEFEYCWDTFVYRQGCPFQPWDGLEEHSQALSGRLRAILQNQGN

SEQ ID NO: 38 - protein, 395 aa, Rattus sp.
  REGION 1..395: note = MISC_FEATURE - Rat APOBEC-3B polypeptide sequence
MQPQGLGPNAGMGPVCLGCSHRRPYSPIRNPLKKLYQQTFYFHFKNVRYAWGRKNNFLCYEVNGMDCALPVPLRQGVFRKQGHIHAELCFIYWFHDKVLRVLSPMEEFKVTWYMSWSPCSKCAEQVARFLAAHRNLSLAIFSSRLYYYLRNPNYQQKLCRLIQEGVHVAAMDLPEFKKCWNKFVDNDGQPFRPWMRLRINFSFYDCKLQEIFSRMNLLREDVFYLQFNNSHRVKPVQNRYYRRKSYLCYQLERANGQEPLKGYLLYKKGEQHVEILFLEKMRSMELSQVRITCYLTWSPCPNCARQLAAFKKDHPDLILRIYTSRLYFWRKKFQKGLCTLWRSGIHVDVMDLPQFADCWTNFVNPQRPFRPWNELEKNSWRIQRRLRRIKESWGL

SEQ ID NO: 39 - protein, 226 aa, Bos taurus
  REGION 1..226: note = MISC_FEATURE - Bovine APOBEC-3B polypeptide sequence
DGWEVAFRSGTVLKAGVLGVSMTEGWAGSGHPGQGACVWTPGTRNTMNLLREVLFKQQFGNQPRVPAPYYRRKTYLCYQLKQRNDLTLDRGCFRNKKQRHAERFIDKINSLDLNPSQSYKIICYITWSPCPNCANELVNFITRNNHLKLEIFASRLYFHWIKSFKMGLQDLQNAGISVAVMTHTEFEDCWEQFVDNQSRPFQPWDKLEQYSASIRRRLQRILTAPI

SEQ ID NO: 40 - protein, 490 aa, Pan troglodytes
  REGION 1..490: note = MISC_FEATURE - Chimpanzee APOBEC-3B polypeptide sequence
MNPQIRNPMEWMYQRTFYYNFENEPILYGRSYTWLCYEVKIRRGHSNLLWDTGVFRGQMYSQPEHHAEMCFLSWFCGNQLSAYKCFQITWFVSWTPCPDCVAKLAKFLAEHPNVTLTISAARLYYYWERDYRRALCRLSQAGARVKIMDDEEFAYCWENFVYNEGQPFMPWYKFDDNYAFLHRTLKEIIRHLMDPDTFTFNFNNDPLVLRRHQTYLCYEVERLDNGTWVLMDQHMGFLCNEAKNLLCGFYGRHAELRFLDLVPSLQLDPAQIYRVTWFISWSPCFSWGCAGQVRAFLQENTHVRLRIFAARIYDYDPLYKEALQMLRDAGAQVSIMTYDEFEYCWDTFVYRQGCPFQPWDGLEEHSQALSGRLRAILQVRASSLCMVPHRPPPPPQSPGPCLPLCSEPPLGSLLPTGRPAPSLPFLLTASFSFPPPASLPPLPSLSLSPGHLPVPSFHSLTSCSIQPPCSSRIRETEGWASVSKEGRDLG

SEQ ID NO: 41 - protein, 190 aa, Homo sapiens
  REGION 1..190: note = MISC_FEATURE - Human APOBEC-3C polypeptide sequence
  REGION 65..100: note = MISC_FEATURE - Nucleic acid editing domain
MNPQIRNPMKAMYPGTFYFQFKNLWEANDRNETWLCFTVEGIKRRSVVSWKTGVFRNQVDSETHCHAERCFLSWFCDDILSPNTKYQVTWYTSWSPCPDCAGEVAEFLARHSNVNLTIFTARLYYFQYPCYQEGLRSLSQEGVAVEIMDYEDFKYCWENFVYNDNEPFKPWKGLKTNFRLLKRRLRESLQ

SEQ ID NO: 42 - protein, 190 aa, Gorilla sp.
  REGION 1..190: note = MISC_FEATURE - Gorilla APOBEC-3C polypeptide sequence
  REGION 65..100: note = MISC_FEATURE - Nucleic acid editing domain
MNPQIRNPMKAMYPGTFYFQFKNLWEANDRNETWLCFTVEGIKRRSVVSWKTGVFRNQVDSETHCHAERCFLSWECDDILSPNTNYQVTWYTSWSPCPECAGEVAEFLARHSNVNLTIFTARLYYFQDTDYQEGLRSLSQEGVAVKIMDYKDFKYCWENFVYNDDEPFKPWKGLKYNFRFLKRRLQEILE

SEQ ID NO: 43 - protein, 202 aa, Macaca mulatta
  REGION 1..202: note = MISC_FEATURE - Rhesus macaque APOBEC-3A polypeptide sequence
  REGION 72..103: note = MISC_FEATURE - Nucleic acid editing domain
MDGSPASRPRHLMDPNTFTFNFNNDLSVRGRHQTYLCYEVERLDNGTWVPMDERRGFLCNKAKNVPCGDYGCHVELRFLCEVPSWQLDPAQTYRVTWFISWSPCFRRGCAGQVRVFLQENKHVRLRIFAARIYDYDPLYQEALRTLRDAGAQVSIMTYEEFKHCWDTFVDRQGRPFQPWDGLDEHSQALSGRLRAILQNQGN

SEQ ID NO: 44 - protein, 185 aa, Bos taurus
  REGION 1..185: note = MISC_FEATURE - Bovine APOBEC-3A polypeptide sequence
  REGION 56..86: note = MISC_FEATURE - Nucleic acid editing domain
MDEYTFTENFNNQGWPSKTYLCYEMERLDGDATIPLDEYKGFVRNKGLDQPEKPCHAELYFLGKIHSWNLDRNQHYRLTCFISWSPCYDCAQKLTTFLKENHHISLHILASRIYTHNRFGCHQSGLCELQAAGARITIMTFEDFKHCWETFVDHKGKPFQPWEGLNVKSQALCTELQAILKTQQN

SEQ ID NO: 45 - protein, 200 aa, Homo sapiens
  REGION 1..200: note = MISC_FEATURE - Human APOBEC-3H polypeptide sequence
  REGION 54..88: note = MISC_FEATURE - Nucleic acid editing domain
MALLTAETFRLQFNNKRRLRRPYYPRKALLCYQLTPQNGSTPTRGYFENKKKCHAEICFINEIKSMGLDETQCYQVTCYLTWSPCSSCAWELVDFIKAHDHLNLGIFASRLYYHWCKPQQKGLRLLCGSQVPVEVMGFPKFADCWENFVDHEKPLSFNPYKMLEELDKNSRAIKRRLERIKIPGVRAQGRYMDILCDAEV

SEQ ID NO: 46 - protein, 210 aa, Macaca mulatta
  REGION 1..210: note = MISC_FEATURE - Rhesus macaque APOBEC-3H polypeptide sequence
MALLTAKTFSLQFNNKRRVNKPYYPRKALLCYQLTPQNGSTPTRGHLKNKKKDHAEIRFINKIKSMGLDETQCYQVTCYLTWSPCPSCAGELVDFIKAHRHLNLRIFASRLYYHWRPNYQEGLLLLCGSQVPVEVMGLPEFTDCWENFVDHKEPPSFNPSEKLEELDKNSQAIKRRLERIKSRSVDVLENGLRSLQLGPVTPSSSIRNSR

SEQ ID NO: 47 - protein, 386 aa, Homo sapiens
  REGION 1..386: note = MISC_FEATURE - Human APOBEC-3D polypeptide sequence
  REGION 78..109: note = MISC_FEATURE - Nucleic acid editing domain
  REGION 262..296: note = MISC_FEATURE - Nucleic acid editing domain
MNPQIRNPMERMYRDTFYDNFENEPILYGRSYTWLCYEVKIKRGRSNLLWDTGVFRGPVLPKRQSNHRQEVYFRFENHAEMCFLSWFCGNRLPANRRFQITWFVSWNPCLPCVVKVTKFLAEHPNVTLTISAARLYYYRDRDWRWVLLRLHKAGARVKIMDYEDFAYCWENFVCNEGQPFMPWYKFDDNYASLHRTLKEILRNPMEAMYPHIFYFHFKNLLKACGRNESWLCFTMEVTKHHSAVFRKRGVFRNQVDPETHCHAERCFLSWFCDDILSPNTNYEVTWYTSWSPCPECAGEVAEFLARHSNVNLTIFTARLCYFWDTDYQEGLCSLSQEGASVKIMGYKDFVSCWKNFVYSDDEPFKPWKGLQTNFRLLKRRLREILQ

SEQ ID NO: 48 - protein, 236 aa, Homo sapiens
  REGION 1..236: note = MISC_FEATURE - Human APOBEC-1 polypeptide sequence
MTSEKGPSTGDPTLRRRIEPWEFDVFYDPRELRKEACLLYEIKWGMSRKIWRSSGKNTTNHVEVNFIKKFTSERDFHPSMSCSITWFLSWSPCWECSQAIREFLSRHPGVTLVIYVARLFWHMDQQNRQGLRDLVNSGVTIQIMRASEYYHCWRNFVNYPPGDEAHWPQYPPLWMMLYALELHCIILSLPPCLKISRRWQNHLTFFRLHLQNCHYQTIPPHILLATGLIHPSVAWR

SEQ ID NO: 49 - protein, 229 aa, Mus musculus
  REGION 1..229: note = MISC_FEATURE - Mouse APOBEC-1 polypeptide sequence
MSSETGPVAVDPTLRRRIEPHEFEVFFDPRELRKETCLLYEINWGGRHSVWRHTSQNTSNHVEVNFLEKFTTERYFRPNTRCSITWFLSWSPCGECSRAITEFLSRHPYVTLFIYIARLYHHTDQRNRQGLRDLISSGVTIQIMTEQEYCYCWRNFVNYPPSNEAYWPRYPHLWVKLYVLELYCIILGLPPCLKILRRKQPQLTFFTITLQTCHYQRIPPHLLWATGLK

SEQ ID NO: 50 - protein, 224 aa, Homo sapiens
  REGION 1..224: note = MISC_FEATURE - Human APOBEC-2 polypeptide sequence
MAQKEEAAVATEAASQNGEDLENLDDPEKLKELIELPPFEIVTGERLPANFFKFQFRNVEYSSGRNKTFLCYVVEAQGKGGQVQASRGYLEDEHAAAHAEEAFFNTILPAFDPALRYNVTWYVSSSPCAACADRIIKTLSKTKNLRLLILVGRLFMWEEPEIQAALKKLKEAGCKLRIMKPQDFEYVWQNFVEQEEGESKAFQPWEDIQENFLYYEEKLADILK

SEQ ID NO: 51 - protein, 224 aa, Mus musculus
  REGION 1..224: note = MISC_FEATURE - Mouse APOBEC-2 polypeptide sequence
MAQKEEAAEAAAPASQNGDDLENLEDPEKLKELIDLPPFEIVTGVRLPVNFFKFQFRNVEYSSGRNKTFLCYVVEVQSKGGQAQATQGYLEDEHAGAHAEEAFFNTILPAFDPALKYNVTWYVSSSPCAACADRILKTLSKTKNLRLLILVSRLFMWEEPEVQAALKKLKEAGCKLRIMKPQDFEYIWQNFVEQEEGESKAFEPWEDIQENFLYYEEKLADILK

SEQ ID NO: 52 - protein, 224 aa, Rattus sp.
  REGION 1..224: note = MISC_FEATURE - Rat APOBEC-2 polypeptide sequence
MAQKEEAAEAAAPASQNGDDLENLEDPEKLKELIDLPPFEIVTGVRLPVNFFKFQFRNVEYSSGRNKTFLCYVVEAQSKGGQVQATQGYLEDEHAGAHAEEAFFNTILPAFDPALKYNVTWYVSSSPCAACADRILKTLSKTKNLRLLILVSRLFMWEEPEVQAALKKLKEAGCKLRIMKPQDFEYLWQNFVEQEEGESKAFEPWEDIQENFLYYEEKLADILK

SEQ ID NO: 53 - protein, 208 aa, Petromyzon marinus
  REGION 1..208: note = MISC_FEATURE - Petromyzon marinus CDA1 (pmCDAl) polypeptide sequence
MTDAEYVRIHEKLDIYTFKKQFFNNKKSVSHRCYVLFELKRRGERRACFWGYAVNKPQSGTERGIHAEIFSIRKVEEYLRDNPGQFTINWYSSWSPCADCAEKILEWYNQELRGNGHTLKIWACKLYYEKNARNQIGLWNLRDNGVGLNVMVSEHYQCCRKIFIQSSHNQLNENRWLEKTLKRAEKRRSELSFMIQVKILHTTKSPAV

SEQ ID NO: 54 - protein, 381 aa, Homo sapiens
  REGION 1..381: note = MISC_FEATURE - Human APOBEC3G D316R D317R polypeptide sequence
MKPHFRNTVERMYRDTFSYNFYNRPILSRRNTVWLCYEVKTKGPSRPPLDAKIFRGQVYSELKYHPEMRFFHWFSKWRKLHRDQEYEVTWYISWSPCTKCTRDMATFLAEDPKVTLTIFVARLYYFWDPDYQEALRSLCQKRDGPRATMKFNYDEFQHCWSKFVYSQRELFEPWNNLPKYYILLHFMLGEILRHSMDPPTFTFNFNNEPWVRGRHETYLCYEVERMHNDTWVLLNQRRGFLCNQAPHKHGFLEGRHAELCFLDVIPFWKLDLDQDYRVTCFTSWSPCFSCAQEMAKFISKKHVSLCIFTARIYRRQGRCQEGLRTLAEAGAKISFTYSEFKHCWDTFVDHQGCPFQPWDGLDEHSQDLSGRLRAILQNQEN

SEQ ID NO: 55 - protein, 182 aa, Homo sapiens
  REGION 1..182: note = MISC_FEATURE - Human APOBEC3G chain A polypeptide sequence
MDPPTFTFNFNNEPWWGRHETYLCYEVERMHNDTWVLLNQRRGFLCNQAPHKHGFLEGRHAELCFLDVIPFWKLDLDQDYRVTCFTSWSPCFSCAQEMAKFISKNKHVSLCIFTARIYDDQGRCQEGLRTLAEAGAKISFTYSEFKHCWDTFVDHQGCPFQPWDGLDEHSQDLSGRLRAILQ

SEQ ID NO: 56 - protein, 184 aa, Homo sapiens
  REGION 1..184: note = MISC_FEATURE - Human APOBEC3G chain A D120R D121R polypeptide sequence
MDPPTFTFNFNNEPWVRGRHETYLCYEVERMHNDTWVLLNQRRGFLCNQAPHKHGFLEGRHAELCFLDVIPFWKLDLDQDYRVTCFTSWSPCFSCAQEMAKFISKNKHVSLCIFTARIYRRQGRCQEGLRTLAEAGAKISFMTYSEFKHCWDTFVDHQGCPFQPWDGLDEHSQDLSGRLRAILQ

SEQ ID NO: 57 - protein, 367 aa, Homo sapiens
  REGION 1..367: note = MISC_FEATURE - hAPOBEC-4 polypeptide sequence
MEPIYEEYLANHGTIVKPYYWLSFSLDCSNCPYHIRTGEEARVSLTEFCQIFGFPYGTTFPQTKHLTFYELKTSSGSLVQKGHASSCTGNYIHPESMLFEMNGYLDSAIYNNDSIRHIILYSNNSPCNEANHCCISKMYNFLITYPGITLSIYFSQLYHTEMDFPASAWNREALRSLASLWPRVVLSPISGGIWHSVLHSFISGVSGSHVFQPILTGRALADRHNAYEINAITGVKPYFTDVLLQTKRNPNTKAQEALESYPLNNAFPGQFFQMPSGQLQPNLPPDLRAPVVFVLVPLRDLPPMHMGQNPNKPRNIVRHLNMPQMSFQETKDLGRLPTGRSVEIVEITEQFASSKEADEKKKKKGKK

SEQ ID NO: 58 - protein, 388 aa, Rattus norvegicus
  REGION 1..388: note = MISC_FEATURE - rAPOBEC-4 polypeptide sequence
MEPLYEEYLTHSGTIVKPYYWLSVSLNCTNCPYHIRTGEEARVPYTEFHQTFGFPWSTYPQTKHLTFYELRSSSGNLIQKGLASNCTGSHTHPESMLFERDGYLDSLIFHDSNIRHIILYSNNSPCDEANHCCISKMYNFLMNYPEVTLSVFFSQLYHTENQFPTSAWNREALRGLASLWPQVTLSAISGGIWQSILETFVSGISEGLTAVRPFTAGRTLTDRYNAYEINCITEVKPYFTDALHSWQKENQDQKVWAASENQPLHNTTPAQWQPDMSQDCRTPAVFMLVPYRDLPPIHVNPSPQKPRTVVRHLNTLQLSASKVKALRKSPSGRPVKKEEARKGSTRSQEANETNKSKWKKQTLFIKSNICHLLEREQKKIGILSSWSV

SEQ ID NO: 59 - protein, 363 aa, Macaca fascicularis
  REGION 1..363: note = MISC_FEATURE - mfAPOBEC-4 polypeptide sequence
MEPTYEEYLANHGTIVKPYYWLSFSLDCSNCPYHIRTGEEARVSLTEFCQIFGFPYGTTYPQTKHLTFYELKTSSGSLVQKGHASSCTGNYIHPESMLFEMNGYLDSAIYNNDSIRHIILYCNNSPCNEANHCCISKVYNFLITYPGITLSIYFSQLYHTEMDFPASAWNREALRSLASLWPRVVLSPISGGIWHSVLHSFVSGVSGSHVFQPILTGRALTDRYNAYEINAITGVKPFFTDVLLHTKRNPNTKAQMALESYPLNNAFPGQSFQMTSGIPPDLRAPVVFVLLPLRDLPPMHMGQDPNKPRNIIRHLNMPQMSFQETKDLERLPTRRSVETVEITERFASSKQAEEKTKKKKGKK

SEQ ID NO: 60 - protein, 218 aa, Rattus norvegicus
  REGION 1..218: note = MISC_FEATURE - rAPOBEC-1 (delta 177-186) polypeptide sequence
MSSETGPVAVDPTLRRRIEPHEFEVFFDPRELRKETCLLYEINWGGRHSIWRHTSQNTNKHVEVNFIEKFTTERYFCPNTRCSITWFLSWSPCGECSRAITEFLSRYPHVTLFIYIARLYHHADPRNRQGLRDLISSGVTIQIMTEQESGYCWRNFVNYSPSNEAHWPRYPHLWVRGLPPCLNILRRKQPQLTFFTIALQSCHYQRLPPHILWATGLK

SEQ ID NO: 61 - protein, 218 aa, Rattus norvegicus
  REGION 1..218: note = MISC_FEATURE - rAPOBEC-1 (delta 202-213) polypeptide sequence
MSSETGPVAVDPTLRRRIEPHEFEVFFDPRELRKETCLLYEINWGGRHSIWRHTSQNTNKHVEVNFIEKFTTERYFCPNTRCSITWFLSWSPCGECSRAITEFLSRYPHVTLFIYIARLYHHADPRNRQGLRDLISSGVTIQIMTEQESGYCWRNFVNYSPSNEAHWPRYPHLWVRLYVLELYCIILGLPPCLNILRRKQPQHYQRLPPHILWATGLK

SEQ ID NO: 62 - protein, 198 aa, Mus musculus
  REGION 1..198: note = MISC_FEATURE - mouse cytidine deaminase polypeptide sequence
  REGION 1..30: note = MISC_FEATURE - Nuclear localization sequence
  REGION 183..198: note = MISC_FEATURE - Nuclear export signal
MDSLLMKQKKFLYHFKNVRWAKGRHETYLCYVVKRRDSATSCSLDFGHLRNKSGCHVELLFLRYISDWDLDPGRCYRVTWFTSWSPCYDCARHVAEFLRWNPNLSLRIFTARLYFCEDRKAEPEGLRRLHRAGVQIGIMTFKDYFYCWNTFVENRERTFKAWEGLHENSVRLTRQLRRILLPLYEVDDLRDAFRMLGF

SEQ ID NO: 63 - protein, 224 aa, Petromyzon marinus
  REGION 1..224: note = MISC_FEATURE - pmCDA-1 polypeptide sequence
MAGYECVRVSEKLDFDTFEFQFENLHYATERHRTYVIFDVKPQSAGGRSRRLWGYIINNPNVCHAELILMSMIDRHLESNPGVYAMTWYMSWSPCANCSSKLNPWLKNLLEEQGHTLTMHFSRIYDRDREGDHRGLRGLKHVSNSFRMGVVGRAEVKECLAEYVEASRRTLTWLDTTESMAAKMRRKLFCILVRCAGMRESGIPLHLFTLQTPLLSGRVVWWRV

SEQ ID NO: 64 - protein, 331 aa, Petromyzon marinus
  REGION 1..331: note = MISC_FEATURE - pmCDA-2 polypeptide sequence
MELREVVDCALASCVRHEPLSRVAFLRCFAAPSQKPRGTVILFYVEGAGRGVTGGHAVNYNKQGTSIHAEVLLLSAVRAALLRRRRCEDGEEATRGCTLHCYSTYSPCRDCVEYIQEFGASTGVRVVIHCCRLYELDVNRRRSEAEGVLRSLSRLGRDFRLMGPRDAIALLLGGRLANTADGESGASGNAWVTETNVVEPLVDMTGFGDEDLHAQVQRNKQIREAYANYASAVSLMLGELHVDPDKFPFLAEFLAQTSVEPSGTPRETRGRPRGASSRGPEIGRQRPADFERALGAYGLFLHPRIVSREADREEIKRDLIVVMRKHNYQGP

SEQ ID NO: 65 - protein, 209 aa, Petromyzon marinus
  REGION 1..209: note = MISC_FEATURE - pmCDA-5 polypeptide sequence
MAGDENVRVSEKLDFDTFEFQFENLHYATERHRTYVIFDVKPQSAGGRSRRLWGYIINNPNVCHAELILMSMIDRHLESNPGVYAMTWYMSWSPCANCSSKLNPWLKNLLEEQGHTLMMHFSRIYDRDREGDHRGLRGLKHVSNSFRMGVVGRAEVKECLAEYVEASRRTLTWLDTTESMAAKMRRKLFCILVRCAGMRESGMPLHLFT

SEQ ID NO: 66 - protein, 158 aa, Saccharomyces cerevisiae
  REGION 1..158: note = MISC_FEATURE - yCD polypeptide sequence
MVTGGMASKWDQKGMDIAYEEAALGYKEGGVPIGGCLINNKDGSVLGRGHNMRFQKGSATLHGEISTLENCGRLEGKVYKDTTLYTTLSPCDMCTGAIIMYGIPRCVVGENVNFKSKGEKYLQTRGHEVVVVDDERCKKIMKQFIDERPQDWFEDIGE

SEQ ID NO: 67 - protein, 194 aa, synthetic construct
  REGION 1..194: note = cytidine deaminase polypeptide sequence
MKPQIRDHRPNPMEAMYPHIFYFHFENLEKAYGRNETWLCFTVEIIKQYLPVPWKKGVFRNQVDPETHCHAEKCFLSWFCNNTLSPKKNYQVTWYTSWSPCPECAGEVAEFLAEHSNVKLTIYTARLYYFWDTDYQEGLRSLSEEGASVEIMDYEDFQYCWENFVYDDGEPFKRWKGLKYNFQSLTRRLREILQ

SEQ ID NO: 68 - protein, 192 aa, synthetic construct
  REGION 1..192: note = cytidine deaminase polypeptide sequence
MADSSEKMRGQYISRDTFEKNYKPIDGTKEAHLLCEIKWGKYGKPWLHWCQNQRMNIHAEDYFMNNIFKAKKHPVHCYVTWYLSWSPCADCASKIVKFLEERPYLKLTIYVAQLYYHTEEENRKGLRLLRSKKVIIRVMDISDYNYCWKVFVSNQNGNEDYWPLQFDPWVKENYSRLLDIFWESKCRSPNPW

SEQ ID NO: 69 - protein, 280 aa, synthetic construct
  REGION 1..280: note = cytidine deaminase polypeptide sequence
MDPQRLRQWPGPGPASRGGYGQRPRIRNPEEWFHELSPRTFSFHFRNLRFASGRNRSYICCQVEGKNCFFQGIFQNQVPPDPPCHAELCFLSWFQSWGLSPDEHYYVTWFISWSPCCECAAKVAQFLEENRNVSLSLSAARLYYFWKSESREGLRRLSDLGAQVGIMSFQDFQHCWNNFVHNLGMPFQPWKKLHKNYQRLVTELKQILREEPATYGSPQAQGKVRIGSTAAGLRHSHSHTRSEAHLRPNHSSRQHRILNPPREARARTCVLVDASWICYR

SEQ ID NO: 70 - protein, 555 aa, synthetic construct
  REGION 1..555: note = pYY-BEM3.1; tr|F7B644|F7B644_HORSE polypeptide sequence
MPRGRARERQRRNPMEKLDAEAFSFHFLNMEFVYDRNCSYLCYQVEGRLSGSPVLSEQGVFPNEVCGKTRRHAELCFLDWFRGRLSPDEYYCVTWFISWSPCSNCAREVAEFLKRHRNVELSIFAARLYYCRDHEQGLQSLCNRGAQLAVMLRKDFTYCWDNFVHNSGREFSPWENIDANSDLLARKLEDLLKNPMEKLHRKTFSFHFRNLKFAKGRKCSYLCYRVEGRLSGSPGLSEQGVFLNEVCDENCRHAELCFLHWFRGRLSPHADYRVTWFISWSPCSNCAREVAEFLKQHRNVELHISAARLYYWQRNKPGLRNLRSSGAQLAIMFFWDFRDCWDNFVHNSGRHFIPWKKINVNSRLLATKLEDLLKNPLEKLHPNTFSFHFCNLEFAYDRKYSYLCYQVEGRLSGSPGLSEQGVFLNEVCGKTRCHAELCFLDWFRVRLSPDEYYRVTWFISWSPCFYCAREVADFLKQYRNVKLSIFAARLYYCRDHAQGLRSLCSSGAQLAIMFFWDFRYCWDNFVHNSGREFRPWKKINVNSRLLATKLEDILK

SEQ ID NO: 71 - protein, 437 aa, synthetic construct
  REGION 1..437: note = pYY-BEM3.2; tr|D1LZA1|D1LZA1_PANTI polypeptide sequence
MEPWRPSPRNPMDRIDPKTFRFQFPNLRYASGRKLCYLCFQVERDYFYYNDSDWGVFRNEVHPWAPCHAEQCFLSWFRDQYPYRDEDYNVTWFLSWSPCPTCAEEVVEFLEEYRNLTLSIFTSRLYYFWHPNYQEGLCKLWDAGVQLDIMSCDEFEYCWDNFVYHKGMRFQRRNLLKDYDFLAAKLQEILSPGQQRKRDWPFPPRPGAQVDPRSWVQEVTEPGINTRRHPLHLLVSFLLPRPTMNPLQEDIFYRQFGNQHRVPKPYYYRRKTYLCYQLKLPEGTLIDKDCLRNKKKRHAEICFIDKIKSLTRDTSQRFEIICYITWSPCPFCAEELVAFVKDNPHLSLRIFASRLYVHWRWKYQQGLRHLHASGIPVAVMSLPEFEDCWRNFVDHQDRLFQPWRNLDQYSESIKRRLGKILTPLNDLRNDFRNLKLE

SEQ ID NO: 72 - protein, 440 aa, synthetic construct
  REGION 1..440: note = pYY-BEM3.3; tr|A0A3Q0DM17|A0A3Q0DM17_TARSY polypeptide sequence
MPMKRMYSNIYFDHFNNQRLLSGQNAPWLCFKVERVENCMLVPLETGVFGNQVSGCCGKTERPVEPTSLTRSVLVSPNPGTELRAQQPSRKGHLGKLGCVEYPSPGLALVMLGYGASTYCPDSSMYCPETCHHPEMCFLYWFEKTLSHEEQYQITWYVSWSPCVNCAEEVAEFLSVHPKVNLTIYAARLYCYQKLNHRQGLRRLCKEGACVKIMNYEEFDHCWENFVYNNYKSFKPWVKLQDNYELLATELDKILRIPMERMPQKKFRFHFQNLIAKDRNTTWLCFEVKNVRKKHPPDLLERGIFQNQVTPRINCHAEMCFLSWFLENMLLHGKRYQVTWYISWSPCSICAEEVAEFLSAHPKVSLTIYAARLYYFWVPGYRQGLRRLVEEGARVEIMNYEEFDYCWENFVSINNEPFQPWEGLHEKYGYLVTKLNNILG

SEQ ID NO: 73 - protein, 453 aa, synthetic construct
  REGION 1..453: note = pYY-BEM3.4; tr|A0A3Q0DNJ5|A0A3Q0DNJ5_TARSY polypeptide sequence
MEDNPEPRPRQQMDQDTFIFNFNNDPSVRGRHQTFLCYEVEHLDDDTWVPQDKYLGFLHNQPQSRSNAYCAYHAELCFLELVSSWQLDPAQRYRVTCFISWSPCSSCAQEVAAFLKKNRHVTLRILAARIYDYYQGYEDGLRTLQGVGVDITVMTSAEFGHCWNTFVDHQGSPFQPWEGLDQHSQVIWQRMQDILQVIPAKYLMEKVKYTVTVDILFKGRVPGPRYLMDQNTFTRNFINNLSVSGRRQTLLCYEVERLGGDIWVPLDQLRGFLLSQARDVLNYYQGRHAEPCFLDLVSSWQLDPAQHYRVTWFISWSPCTSCAQAVAAFLRENRHVTLRILAARIYDYHQGYEEGLRTLQRTGAHIDIMTFKEFGHCWNTFVNHKGSPFKSWTGLDQHSQALRKRLQDILHTMASSLWDQSEPKKPIPSQEVTLPESIPPSHGNRFRLVKRPS

SEQ ID NO: 74 - protein, 424 aa, synthetic construct
  REGION 1..424: note = pYY-BEM3.5; tr|G5AYU5|G5AYU5_HETGA polypeptide sequence
FCFLSCVHRKPIERIYKKAFRFYFRNLRCAYGRNKTFLCYEVKRERDNKVLHKGVVLNQVEPYMPLHAELRFLSWFHDTLLCPLGSYQVTLYVSWSPCSECAEELTTFLAGHRNVTMTIYVAQLYYCNWKSPNREGLKILIAEDARLRVMFYDEFLYCWRNFVKNDYNNFDPWSLLDENSRYHNRILQNILKGWGRPHRVGPEGEQTATPGGSGGHCISVFSLLRRREMTLKEETFRVQFNNAYKAPKPYRRRVTYLCYQLQEANGDPLTKGCLRTKKGYHAESRFIKRICSMDLGQDQSYQVTCFLTWSPCPHCAQELVSFKRAHPHLRLQIFTARLFFHWKRSYQEGLQRLCRAQVPVAVMGHPEFAYCWDNFVDHQPGPFEPPWAKLEYYSSCLKRRLQQILRSWGVDDLTNDFRNLQLGP

SEQ ID NO: 75 - protein, 385 aa, synthetic construct
  REGION 1..385: note = pYY-BEM3.6; tr|A0A2Y9QMV5|A0A2Y9QMV5_TRIMA polypeptide sequence
MLSSPQTPGTRKPMKTLAPDEFSFNFENLRLAHGRNTTFLCFQVETKAPPSLNSPDSGIFQNQDHCPSHHHAEMVFLTWFQKRLSPAQHYEVTWYMSWSPCSRCAVQVAKFLKSNSTVNLSIFVARLYYPRELETKDGLHSLWQAGAQVQIMFFQDFKYCWENFVNNEGKPFQPWKNLDENSKDWDTELKDIHRNTTDLLTEEMFYSQFYNREKKSSIPRKTYLCYQLNEPQPVKRCLHYKKGYHAVTRFIDGIVSMNLDPARSYDITCYFTWSPCNRYARKLVSFIEDYPNLRLKVYTSRLYFHWCWTNMQGLQHLQNSRVTVAVMTFRDFEYCWKNFVDNQGKPFEPWEKLDLYSQSTERRLRRILKPLTPDVLNEDFGNLHL

SEQ ID NO: 76 - protein, 381 aa, synthetic construct
  REGION 1..381: note = pYY-BEM3.7; tr|H0XHI0|H0XHI0_OTOGA polypeptide sequence
LSCAFRDPMNRMYPKTFCQNFEKEPCPSNQNSSWLCFEVETKNSAVFFHRGVFRNQPAPPPRAPTSVLLSQGPVKTPCHAEECFLTWIQGVLPPDHHYHVTWYVSRGPCANCANLIVHFLAMHRRVTLTIFAAHLNFFWESDFQQGLLRMDQEGVQLHIMGYEEFEYCWDNFVYNQRKQFVPWNGLNENYEFMVSTLEDILRSPLDRIRQKDFSIHFRNSLWLDDKSTWLCFEVKRTKSPVPLYRGVFRNQSPPKTPCHAEVRFFTWLQDLPPDFCCQFTWYLSWSPCADCADLVANFLAKHRNVSLTIFVARLYYYRDPEMHRGLRRMYQEGANVDIMSVIEFEYCWDNFVYNQGKQFVPWNGLNENYEFLVPRLQEILE

SEQ ID NO: 77 - protein, 337 aa, synthetic construct
  REGION 1..337: note = pYY-BEM3.8; tr|A0A3M0K4Y7|A0A3M0K4Y7_HIRRU polypeptide sequence
MYISKKALRRHFDPRVYPRETYLLCELQWEGSRRVWIHWIRNVPDHHAEEYFLEEVFEPRNYGFCNITLYLSWSPCCTCCSKIRDFLKRNPNVKIDIRVARLIYPDYAETRSSLRELNGLQRVSIQVMEAAGLSCIESKNHRISQVERDPKGSSSPTLFTLQDHLKLSNMTESVIQDSVSIQICYQMRILGFQCHIRWKLQPEDFQRNYSPNQIGRVVYLLYEVRWRRGSIWRNWCSNNPEQHAEVNFLENHFHHRPQTPCSITWFLSTSPCGKCSRRILEFLKSQPNVTLEIYAAKLFRHHDIRNRQGLRNLMMNGVTIYIMNLEGNPASLCLSVD

SEQ ID NO: 78 - protein, 237 aa, synthetic construct
  REGION 1..237: note = pYY-BEM3.9; tr|A0A3P4LUZ8|A0A3P4LUZ8_GULGU polypeptide sequence
MSFEDYEYCWETFVDHKGMYFQSWDLLRDNDLLAAELKNILRSTMNPLRQEIFYHQFGNQPRAPRPYHRRKTYLCYQLQPHEGPITARVCLQNKKKRHAEIRFIDNIRALRLDRSQTFEITCYLTWSPCPTCAKALAVFVQDHPHISLRLFASRLFIHWCWKYQEGLRLLHRSRIPVAVMRLQEFEDCWRNFVDNQDEPFQPWNKLEQYSESITRRLRRILGHPQNNLENDFRNLHI

SEQ ID NO: 79 - protein, 221 aa, synthetic construct
  REGION 1..221: note = pYY-BEM3.10; tr|G5BPM8|G5BPM8_HETGA polypeptide sequence
RRRIEPWQFEASFDPRQLRRETCLLSEVRWGTSPRAWRGCSLNTARHAEVSFMDRLTSEGRLRGPVRCSITWFLSWSPCGACAQAIGEFLRQHPNVSLVIYIARLFWHVDEQNRQGLRDLVTRGVRMQVMSDPEFAHCWRNFVNYSPGQEARWPQVPPVWTWLYSLELHCILLNLPPCLKISRRHHNQLTFFQLILQNCHYQAIPSPVLLASGLIHPFVTW

SEQ ID NO: 80 - protein, 211 aa, synthetic construct
  REGION 1..211: note = pYY-BEM3.11; tr|H2M862|H2M862_ORYLA polypeptide sequence
MITKLDSVLLPKKKFIYHYKNMRWARGRHETYLCFVVKRRVGPESLSFDFGHLRNRNGCHVELLFLRHLSALCPGLWGYGATGQGRVSYSITWFCSWSPCANCSFRLAQFLSQTPNLRLRIFVSRLYFCDLEDSREREGLRMLKKVGVHITVMSYKDYFYCWQTFVARKQSKFKPWDGLHQNSVRLSRKLNRILQPCETEDFRDAFKLLGL

SEQ ID NO: 81 - protein, 353 aa, synthetic construct
  REGION 1..353: note = pYY-BEM3.12; tr|H0Y0C6|H0Y0C6_OTOGA polypeptide sequence
MYLKTFYRHFNNRPYLSRRNDTWLCFEVKTTSSNSPGSFYSGVFRNQGPRYCPWHTELCFLTWVRPIVSHHHFYQITWYMSWSPCANCAWQVATFLATHENVSLTNYTVRIYYFWRQDYRQGLLRMIEEGTQVYVMSSKEFQHCWENFVDHWGTRWVTCWNRLKKNYEFLVTRLSEILSDPKERISPNTFYNQFNNTPVPRGRKDTWLCFEVKEKNSNSPGSFHRGVFQNQVFSGTSSHARRCPPDHHYEVTWYTSWSPCAHCAWHVVNFLTSNPNVSLTIFAARLYYIYRPEIQQGLRRVFQEGAKVHIMSLKEFKYCWAKLVYNSGMRFMPWYQFNFNFLFPNTTLKGDLH

SEQ ID NO: 82 - protein, 189 aa, synthetic construct
  REGION 1..189: note = pYY-BEM3.13; tr|A0A3Q2Z5X6|A0A3Q2Z5X6_HIPCM polypeptide sequence
MDVHFMNFIYHYKNMRWAKGRNETYLCFVVKRRVGPNSLTFDFGHLRNRNGCHVELLFLRYLGRRLSYSITWFCSWSPCANCSAALSQFLSRMPNLRLRIFVARLYFCDMEDSHEREGLRLLQKAGVQVTVMSYKDYYYCWQTFVDRKKSHFKAWEDLHQNSVRLSRKLNRILQPCEMDLRDAFKLLGL

SEQ ID NO: 83 - protein, 190 aa, synthetic construct
  REGION 1..190: note = pYY-BEM3.15; tr|A0A2K6NY90|A0A2K6NY90_RHIRO polypeptide sequence
MNPHIRNPMEAMYPGTFYFHFKNLWEADNRNESWLCFAVEVIKHHSTVSWKRGVFRNQVDPETHCHAEKCFLSWFCDNTLSPKKNYQVTWYTSWSPCPECAREVAKFLARHSNVMLTIYTARLYYSQYPNYQEGLRRLNEEGVPVEIMDYEDFKYCWENFVYNGDELFKPWKGLKYNFLFLDSKLQEILE

SEQ ID NO: 84 - protein, 202 aa, synthetic construct
  REGION 1..202: note = pYY-BEM3.16; tr|Q6ICH2|Q6ICH2_HUMAN polypeptide sequence
MNPQIRNPMERMYRDTFYDNFENEPILYGRSYTWLCYEVKIKRGRSNLLWDTGVFRGPVLPKRQSNHRQEVDPETHCHAERCFLSWFCDDILSPNTNYEVTWYTSWSPCPECAGEVAEFLARHSNVNLTIFTARLCYFWDTDYQEGLCSLSQEGASVKIMGYKDFVSCWKNFVYSDDEPFKPWKGLQTNFRLLKRRLREILQ

SEQ ID NO: 85 - protein, 202 aa, synthetic construct
  REGION 1..202: note = pYY-BEM3.17; tr|G8GPV1|G8GPV1_CERNE polypeptide sequence
MDGSPASRPGHVMDPGTFTSNFNNKPWVSGQRETYLCYKVERSHNDTWVLLNQHRGFLRNQAKNRLHGDYGCHAELCFLGEVPSWRLDPTQTYRVTWFISWSPCFSGGCAEQVRAFLQENTHVRLRIFAARIYDYDFLYQEALRTLRDAGAQVSIMTYEEFKHCWDTFVDHQGRPFQPWDGLDEHSQALSGRLQAILQNQGN

SEQ ID NO: 86 - protein, 181 aa, synthetic construct
  REGION 1..181: note = pYY-BEM3.18; tr|Q1WBT6|Q1WBT6_SYMSY polypeptide sequence
MALLTAKTFRLQFNNKRRVTKPYYPRKALLCYQLTPQNGSTPTRGYFKNKKKRHAEIRFINKIKSMGLDETQCYQVTCYLTWSPCPSCAWELVDFIKAHDHLNLGIFASRLYYHWCRHQQEGLRLLCGSQVPVEVMGFPEFADCWENFVDHEEPLSFNPSEMLEELDKNSRAIKRRLEKIK

SEQ ID NO: 87 - protein, 211 aa, synthetic construct
  REGION 1..211: note = pYY-BEM3.19; tr|A0A3B4CS14|A0A3B4CS14_PYGNA polypeptide sequence
MDNTNRRKFIYHYKNVRWARGRHETYLCFVVKKRNSPDSLSFDFGHLRNRNGCHVELLFLRYIEVLCPGLWGSGVDGVRVSYAVTWFCSWSPCSNCAQRLTNFLSQTPNLRLRIFVARLYFCDEEDSLEREGLRHLQRAGVQITVMTYKDFFYCWQTFVASRERCFKAWEGLRQNSVRLSRKLNRILQVFISTPVISPLITTHLGQSWAGG

SEQ ID NO: 88 - protein, 315 aa, synthetic construct
  REGION 1..315: note = pYY-BEM3.20; tr|A0A087XZI4|A0A087XZI4_POEFO polypeptide sequence
RKVSYSVTWFCSWSPCANCSIRLAQFLHQTPNLRLRIFVSRLYFCDLEDSREREGLRILKKAGVHITVMSYKDYFYCWQTFVAKSQSKFKPWDGLHQNYIRLSRKLNRILQPALDIKKFIYHYKNLRWARGRCETYLCFVVKKKLHLFMFVIVGRNRLFDLNVTMNNKSLYLIPLHLQLLFLRHLGALCPGLWGYGVTGERKVSYSVTWFCSWSPCANCSIRLAQFLHQTPNLRLRIFVSRLYFCDLEDSREREGLRILKKAGVHITVMSYKDYFYCWQTFVAKSQSKFKPWDGLHQNYIRLSRKLNRILQVQFF

SEQ ID NO: 89 - protein, 189 aa, synthetic construct
  REGION 1..189: note = pYY-BEM3.21; tr|A0A341AEK4|A0A341AEK4_9CETA polypeptide sequence
MASDRGPSAGDATSRRRIEPWEFEVSFDPRELCKETRLLYEIKWGRSQHVWRHSGKNTTNHVECNFIEKFTSERPFHRSVSCCITWFLSWSPCWECSKAIREFLNQHPRVTLFIYVARLFQHMDPQNRQGLRDLIHSGVTIQIMGPTEYDYCWRNFVNYPPGKEAHWPRYPPPLMKLYALELHCIILVP

SEQ ID NO: 90 - protein, 180 aa, synthetic construct
  REGION 1..180: note = pYY-BEM3.22; tr|E2D879|E2D879_MUSMI polypeptide sequence
RNLISRETFNFNFENLCYAKGRKNTFLCYEVTRKDCDSPVSLCHGVFKNKGSIHAEICFLYWFHDKVLKVLTPREEFKVTWYMSWSPCFECAEQVVRFLATHHNLNLTIFSSRLYNVSDPDTQQKLCRLVQEGAQVAVMDLSEFKKCWEKFVDNDGQQFRPWKRLRTNFRYQNSKLQEIL

SEQ ID NO: 91 - protein, 221 aa, synthetic construct
  REGION 1..221: note = pYY-BEM3.23; tr|A0A2K5RDN6|A0A2K5RDN6_CEBCA polypeptide sequence
MWEAQSPGLSREWGSVAISPEDPGPLHIGRFLSCAFRHPMNAMYPGIFNFHFRNLRKAYGRNETWLCFTVEGIMNRSTVSWKSGVFRNQVGSDPFCHAEMCFLSWFRHNMLSPKKDYEVTWYASWSPCPECAGQVAEFLARHGNVRLTIFTAHLYYFWNPSFRQGLRRLSQEGASVLIMGYEDFEYCWDNFVYNDGQPFKPWKRLQDNSLSLYITLQEILQ

SEQ ID NO: 92 - protein, 206 aa, synthetic construct
  REGION 1..206: note = pYY-BEM3.24; tr|A0A2K5RDN7|A0A2K5RDN7_CEBCA polypeptide sequence
MEASPASRPRPLMGPRTFTENFTNNPEVFGRHQTYLCYEVKCQGPDGTRDLMTEQRDFLCNQARNLLSGFDGRHAERCFLDRVPSWRLDPAQTYRVTCFISWSPCFSCAREVAEFLQENPHVNLRIFAARIYDCRPRYEEGLQMLQNAGAQVSIMTSEEFRHCWDTFVDHQGHPFQPWEGLDEHSQALSRRLQAILQGNRWMILSL

SEQ ID NO: 93 - protein, 184 aa, synthetic construct
  REGION 1..184: note = pYY-BEM3.25; tr|A0A1C9CJ69|A0A1C9CJ69_CERAL polypeptide sequence
NPMKAMDPHIFYFHFKNLRKAYGRNETWLCFAVEIIKQRSTVPWRTGVFRNQVDPESHCHAERCFLSWFCEDILSPNTDYRVTWYTSWSPCLDCAGEVAEFLARHSNVELAIFAARLYYFWDTHYQQGLRSLSEKGASVEIMGYEDFKYCRENFVCDDGKPFKPWKGLKTNFRFLKRRLQEILE

SEQ ID NO: 94 - protein, 197 aa, synthetic construct
  REGION 1..197: note = pYY-BEM3.26; tr|A0A2R2Z4D2|A0A2R2Z4D2_PTEAL polypeptide sequence
MHLQVWRKVTEAWREGYTLKPWSRNPMERLYHDYFYFHFYNLPTPKHRNGCYICYQVEGTKKHSRMPLLRGVFENQESLDMMLSPGEKYRVTWYISWSPCFACVDEVIKFLREHTNVELIIFAARLYHSDILQYRQGLRKLHDAGVHVAIMSYYEFKHCLNDFVFHQGRSFCPWNDLNKNSKNLSNTLEDILRNQED

SEQ ID NO: 95 - protein, 206 aa, synthetic construct
  REGION 1..206: note = pYY-BEM3.27; tr|B7T161|B7T161_SHEEP polypeptide sequence
MTEGWAGSGLPGRGDCVWTPQTRNTMNLLRETLFKQQFGNQPRVPPPYYRRKTYLCYQLKELDDLMLDKGCFRNKKQRHAEIRFIDKINSLNLNPSQSYKIICYITWSPCPNCASELVDFITRNDHLNLQIFASRLYFHWIKPFCRGLHQLQKAGISVAVMTHTEFEDCWEQFVDNQLRPFQPWDKLEQYSASIRRRLQRILTAPT

SEQ ID NO: 96 - protein, 205 aa, synthetic construct
  REGION 1..205: note = pYY-BEM3.28; tr|A0A2R2X2G4|A0A2R2X2G4_PTEAL polypeptide sequence
MAGLGQACEGCCGQMPEISYPMGRLDPKTFSFEFKNLPYAYGRKSSYLCFQVEREQHSSPVPSDWGVFKNQFCGTEPYHAELCFLNWFRAEKLSPYEHYDVTWFLSWSPCSTCAEEIAIFLSNHKNVRLNIFVSRIYYFWKPAFRQGLQELDHLGVQLDAMSFDEFKYCWENFVDNQGMPFRCWKKVHQNYKSVLRKLNEILRRR

SEQ ID NO: 97 - protein, 309 aa, synthetic construct
  REGION 1..309: note = pYY-BEM3.29; tr|G1Q1M4|G1Q1M4_MYOLU polypeptide sequence
YAELSFLDLFQSWNLDRGRQYRLTWYMSWSPYPDCAQKLVEFLGENSHVTLRIFAADIHSLCSGYEDGLRKLRDARAQLAIMTRDELQYCWVTFVDNQGQPFRPWPNLVEHIKTKKQELKDILGNPMRRMYPKTFNFNFQNLNSYGRKSTFLCFEVETWEDGSVLDYQNGVFQNQLDPGHAELCFIEWFHEKVLFPDEVRCPDAQYHVTWYISWSPCFECAEQVAGFLNEHENVDLSISAARLYLCEDEDEQGLQDLVAAGAKVAMMAPEDFEYCWDNFVYNRGWPFTYWKHVRRNYGRLQEKLDEILW

SEQ ID NO: 98 - protein, 216 aa, synthetic construct
  REGION 1..216: note = pYY-BEM3.30; tr|A0A1S3AN78|A0A1S3AN78_ERIEU polypeptide sequence
RRIEPWEFEDFFDPRQFRPETCLLYEVRWGSSRNAWRSTARNTTRHAEVNFLERFAAERHFDKPVSCSITWFLSWSPCWECSQAIGAFLSQHPQVTLAIHVTRLFHHEDEQNRQGLRDLLARGVTLQVMGDSEYAHCWRTFVNSPPGAEGHYPRYPSDFTRLYALELHCIILGLPPCLEILRRYQNQFTLFRLVPQNCHYQMIPHLNFFVVRHYFF

SEQ ID NO: 99 - protein, 201 aa, synthetic construct
  REGION 1..201: note = pYY-BEM3.32; tr|Q4VUI3|Q4VUI3_XENLA polypeptide sequence
MTMDSMLLKRNKFIYHYKNLRWARGRHETYLCYIVKRRYSSVSCALDFGYLRNRNGCHAEMLFLRYLSIWVGHDPHRNYRVTWFSSWSPCYDCAKRTLEFLKGHPNFSLRIFSARLYFCEERNAEPEGLRKLQKAGVRLSVMSYKDYFYCWNTFVETRESGFEAWDGLHENSVRLARKLRRILQPPYDMEDLREVFVLLGL

SEQ ID NO: 100 - protein, 191 aa, synthetic construct
  REGION 1..191: note = pYY-BEM3.33; tr|E2RL86|E2RL86_CANLF polypeptide sequence
MNPLQEETFYQQFSNQRVPKPTYQRRTYLCYQLKPHEGSVIAKVCLQNQEKRHAEICFIDDIKSRQLDPSQKFEITCYVTWSPCPTCAKKLIAFVNDHPHISLRLFASRLYFHWRQKYKRELRHLQKSGIPLAVMSYLEFKDCWEKFVDHKGRPFQPWNKLKQYSESIGRRLQRILQPLNNLENDFRNLRL

SEQ ID NO: 101 - protein, 226 aa, synthetic construct
  REGION 1..226: note = pYY-BEM3.34; tr|G1LWB0|G1LWB0_AILME polypeptide sequence
SSAAPASIHLLDEDTFTENFRNDDWPSRTYLCYKVEGPDQGSGVPLGQDKGILHNKPAQGPEPSRHAECYLLEQIQSWNLDPKLHYGVTCFLSWSPCAKCAQKMARFLQENSHVSLKLFASRLYTRERWDEDYKEGLRTLKRAGASIAIMTYREFEHCWKTFVLHDQEGSCFQPWPFLHKESQKFSEKLQAILQVGVLLLSLPPPLPSSPLSSPWPFPAPLRASTG

SEQ ID NO: 102 - protein, 238 aa, synthetic construct
  REGION 1..238: note = pYY-BEM3.35; tr|A0A1U7S7K7|A0A1U7S7K7_ALLSI polypeptide sequence
MGEHWQYAGSGEYIPQDQFEENFDPSVLLAETHLLSELTWGGRPYKHWYENTEHCHAEIHFLENFSSKNRSCTITWYLSWSPCAECSARIADFMQENTNVKLNIHVARLYLHDDEHTRQGLRYLMKMKRVTIQVMTIPDYTYCWNTFLEDDGEDESDDYGGYAGVHEDEDESDDDDYLPTHFAPWIMLYSLELSCILQGFAPCLKIIQGNHMSPTFQLHVQDQEQKRLLEPANPWGAD

SEQ ID NO: 103 - protein, 220 aa, synthetic construct
  REGION 1..220: note = pYY-BEM3.36; tr|A0A2R2X2J8|A0A2R2X2J8_PTEVA polypeptide sequence
MPRIGNMNLLSEKTFNYHFGNQLRVKKPQGRRRTYLCYKLKLPNETLVKGYFINKKKNHAEIRFINKIRSLNLDQTQSYKITCYITWSPCSYCAGKLVALVKSCPHLSLQIFTSRLYYHWLWKNQAGLRYLWKINISVLVMKEPEFADCWDNFVNHQSRRFKPWEKLTQYSNSTERRLLRILRINRTDLFLAQSSEQDPGLNDLVDAIKRLFLDAHRPRD

SEQ ID NO: 104 - protein, 198 aa, synthetic construct
  REGION 1..198: note = pYY-BEM3.37; tr|A0A151P6M4|A0A151P6M4_ALLMI polypeptide sequence
MAVEEEKGLLGTSQGWKIELKDFQENYMPSTWPKVTHLLYEIRWGKGSKVWRNWCSNTLTQHAEVNCLENAFGKLQFNPPVPCHITWFLSWSPCCQCCRRILQFLRAHSHITLVIKAAQLFKHMDERNRQGLRDLVQSGVHVQVMDLPDYRYCWRTFVSHPHEGEGDFWPWFFPLWITFYTLELQHILLQQHALSYNL

SEQ ID NO: 105 - protein, 158 aa, synthetic construct
  REGION 1..158: note = pYY-BEM3.38; tr|A0A2K6MNR2|A0A2K6MNR2_RHIBE polypeptide sequence
IWLCFTMEIIKQCSTVSWKRGVFRNQVDPETHCHAERCFLSWFWEDTLSPNTNYQVTWYTSWSPCLDCAGEVAEFLARHSNVKLAIFAARLYYFWDTDYQQGLRSLSEEGTSVEIMGYEDFKYCWENFVYNGDEPFKPWKGLKYNFLFLDSKLQEILE

SEQ ID NO: 106 - protein, 182 aa, synthetic construct
  REGION 1..182: note = pYY-BEM3.40; tr|F1CGT0|F1CGT0_ANOCA polypeptide sequence
KAAILLSNLFFRWQMEPEAFQRNFDPREFPECTLLLYEIHWDNNTSRNWCTNKPGLHAEENFLQIFNEKIDIKQDTPCSITWFLSWSPCYPCSQAIIKFLEAHPNVSLEIKAARLYMHQIDCNKEGLRNLGRNRVSIMNLPDYRHCWTTFVVPRGANEDYWPQDFLPAITNYSRELDSILQD

SEQ ID NO: 107 - protein, 230 aa, synthetic construct
  REGION 1..230: note = pYY-BEM3.41; tr|C7AGG3|C7AGG3_HORSE polypeptide sequence
MDPQAPTQRGGLGQAYQGGDYVQAPGNGNTQHLLSEDVFKKQFGNQRRVTKPYYRRKTYVCYQLKLLRGPTIAKGYFRNKKKRHAEIRFIDKINSLGLDQDQSYEITCYVTWSPCATCACKLIKFTRKFPNLSLRIFVSRLYYHWFRQNQQGLRQLWASSIPVVVMGYQEFADCWENFADNRGNPFQSWEKLTEYSKGIKRRLQKILEPLNLNGLEDAMGNLKLGSVDLG

SEQ ID NO: 108 - protein, 197 aa, synthetic construct
  REGION 1..197: note = pYY-BEM3.42; tr|A0A250YMK7|A0A250YMK7_CASCN polypeptide sequence
MSLLKEDIFLYQFNNQQQVQKPYFRRRTYLCYQLEQPNGSRPQWPAKGCLQNKKGHHAEIRFIKRIHSMGLEQDQDYQITCYITWSPCLACACALAELKNHFPRLTLRIFASRLYFHWIRKFQMGLQHLYKSGVLVAVMSLPEFTDCWEKFVNHRQVFFTPWDKLEEHSRSIQRRLRRILQSWDVDDLTDDFRNLRL

SEQ ID NO: 109 - protein, 189 aa, synthetic construct
  REGION 1..189: note = pYY-BEM3.43; tr|B7T160|B7T160_SHEEP polypeptide sequence
MPWISDHVARLDPETFYFQFHNLLYAYGRNCSYICYRVKTWKHRSPVSFDWGVFHNQVYAGTHCHSERRFLSWFCAKKLRPDECYHITWFMSWSPCMKCAELVAGFLGMYQNVTLSIFTARLYYFQKPQYRKGLLRLSDQGACVDIMSYQEFKYCWKKFVYSQRRPFRPWKKLKRNYQLLAAELEDILG

SEQ ID NO: 110 - protein, 541 aa, synthetic construct
  REGION 1..541: note = pYY-BEM4.1; tr|A0A182D0J1|A0A182D0J1_BLAVI polypeptide sequence
MTNPESPPQAPCDFNEDALLNREPLRGSPIKFVSPVDYPDLVFALAGPVGVDIDYIQQSISDCLKSFDYSTEFIRITEIMQDIKCSKTIDCTDMLKEYQSKIEYANELRRAYRAKDLLAALTISAISKLREQIKERDEATNKSNIQPSRRKLAWVVRQLKTPEEVRLLRAVYGKQFVLVSIYSSPQRREDFLISKIKIKSRGTIDNNTSSEGAQRLIERDSKEDNEYGQNLSGTFCLGDIFVDSNNKESAIVSIDRFLNAFFGSNEISPTRDEYGMYLAKTASLRSCDLSRQVGAAIFSKTGEIISLGSNEVPKAGGGTYWTGDNADSRDIRLGHDPNEINKVEIFAEIISRLLEDKLLSNDLLNKDAASIVTILLSKNEGKRYKDLRVMDIIEFGRIIHAEMSAICDAARNGRAIIGATLFCTTFPCHLCAKHIVASGIGRIVYLEPYPKSYAKKLHSDSIQVEDHSDSEKVSFEPFIGISPSRYRELFEGGRRKDPFGEALKWKNDPRKPVIDVVVPPHFEAEKLVIAQLGKLIVSGTG

SEQ ID NO: 111 - protein, 330 aa, synthetic construct
  REGION 1..330: note = pYY-BEM4.2; tr|A0A2D6EXD2|A0A2D6EXD2_9ARCH polypeptide sequence
MIIGLVGTIGAGKQTIIDYLQEKYGYNALSCSDVLREILKKQGKPVTRDNLREIGNKTREEGGNGAIAKILLEKLRNNWKANYIVDSLRHPDEVSVLRTSPLFHLVAVDADLRIRFERVKARKREEEPTTLPAFVERDQKEMFGTGNEQRIRETMELADELVLNNGTVEELKQRIDDLNLVSDERLRPSWDDYFMRLARLAAQRSNCMSRKVGAIITKDRRVIATGYNGTPRGVKNCNEGGCERCNSAVAKGTAISECLCLHGEENAIIEAGRVRSEGATIYTSFLPCLWCTKMIIQAGLKEVVFSEVYDLHEASIKLFETSGVLIRRLK

SEQ ID NO: 112 - protein, 367 aa, synthetic construct
  REGION 1..367: note = pYY-BEM4.3; tr|F7YVM7|F7YVM7_9THEM polypeptide sequence
MNEFKYMSLALKLAKKGKYTTSPNPMVGAVIVKDGKILATGYHKKAGQPHAEINALSKLNFQAQNCEMYVTLEPCSHYGRTPPCADAIIRSGIRKVVIATLDPNPLVNGKGVEKLKNAGIEVVCGVLEEKAKKLNEKFFKYITTKIPFVALKIAQTLDGKIALKNGESKWITSEKSREYVHKLRMEYDAVLTGIGTILKDDPQLNVRLKKVYKQPLRIILDSKLKIPLSAKVLEDPSKVIILTTALADKEKLEELRSKGVEVIITNEKNGIVDLESALKILGEKKITSVMVEAGPTLLTSFLKESLFDKIYLFIAPKIFGADSKSVFSELGLEDISKSQKFSLESVKKIGEDLLLELYPKQLKKLEE

SEQ ID NO: 113 - protein, 449 aa, synthetic construct
  REGION 1..449: note = pYY-BEM4.4; tr|A0A3M6UNF1|A0A3M6UNF1_9CNID polypeptide sequence
MEEKSELENELMRSTSPKPSVPNGSKGNECEQRETRITKENLYMVLALWMEEFPVVEQTSSAKRLNKVGVVFVLPTDRVLAADCSRDGVHGVARVMVNHCGKLEGCKVFVSRKPCSLCAKLLVQSKVSRVFYLPIEPESENKGEIARADNLFKNSSVGQSVFVPCVEQKVLDKLEDKLPKEIITPDDISECRDNLLKKCGWSAEWFARAQASLPWPCFEGKMKSQVDNDFKSLIKWIAVVKAPMDKGVAFPKVKLTSDSRVVPDCDADNFPDSKTAYHMMIFAKMLARQTDDPKTGVGAVIVRGKVPDIVSLGWNGFPSKALYGEFPRASDDDRALQKKFPYVIHAEQNALMVRNVKDLTDGILFVTKPPCDECAPMIKLSGVKTIVIGEKIEKSRGGELSYNLIKEYIKEGIMTCYQMEATKTKAKRLASDPETRKRLKSSCSNSNDV

SEQ ID NO: 114 - protein, 414 aa, synthetic construct
  REGION 1..414: note = pYY-BEM4.5; tr|A0A2G3K826|A0A2G3K826_9BURK polypeptide sequence
MTKIIDDVNTAAAAVLDQATAAANQTTFAVGGVMVNNQTGEVISAIHNNVIIPLSNNVSFTFDPTAHGERQLVYWYYANKEALKLPEPNQITVITSLDPCAMCTGALLTAGFNVGVVAIDTYAGINCAQNFQFATLPANLRTKAQKNFGYYASGAANFKPLTRSYVGGPSVAFKNGVVTPANLRDCGTVFTQSVDTVRNTSNSTGLAPSQMSNPAELPSNSAILQAYRAIYKKAFTIKIDNPRLPDAQILTELKAVLADAPNARNAVAFIDPFGNLVLCMADAFNTSPVHAAFMNVTQEYAKTRWDLMNKYAQASTTDNPALYLTHPKYGTFVYLYAPDPDDSITIMSLGAYGSTMEGPIPNMFPSNLQFYYPPRNGAQFSELVPVVNELPPFYTQNVNISLMQVPGVTQAPTK

SEQ ID NO: 115 - protein, 308 aa, synthetic construct
  REGION 1..308: note = pYY-BEM4.6; tr|K1ZCJ4|K1ZCJ4_9BACT polypeptide sequence
MSSRAKKNRSTNLKKSIGQKSIENKPTDQKKDQVLVAYVPVIHEGYRRFFRHFPAVKELWLISQELSHELRSLQKDIRALKASETKKLLQTWGQFQKIKLLTPSSLAILQKTTTQLVFPDEEISHHLVEKYFAQNRVLFASFFLRWDKKSSLKKHDLQEYSEISNKEFDQMMIAIAQQEADKSDDWWRQVGGLIFKDETILLLAHNQHTPTEAEAYFAGDPRADFHQGEYLKISTAIHAEAYLIAQAAKQGISLEGADLYVTTFPCPVCAKQVAYSGIKRVFFREGYSLLDGETILKANGVKLIRVTV

SEQ ID NO: 116 - protein, 615 aa, synthetic construct
  REGION 1..615: note = pYY-BEM4.7; tr|A0A1G3PNQ8|A0A1G3PNQ8_9SPIR polypeptide sequence
MRDLPLLVLGLTGPMGAGCTRFARDISKMEPGKVIKKQGLLDQVAHEISELSKKASEIRLQCISNGKNSELAELKRLNRRLNAKLAERACLHVIAKSSLPEPLFISLNTIVIKIAVDSITAPEFAEWAKNHAKVADLLKWLRTQWESELTLYETWGQDAGRFSQDELEKMDAMFAEFERIGDEILKEDFETYFGKRNNDFSIRMFSENIRLSGNPFRPAENGGGGGKYDEPSMVMIARETDRYIRFYRTRSDQKRSHFFIIDEIKNPREAEYFRARHQNFFLVSIFSSSEIRASRMRRGLGHDAGVSDADFQHLFRELDSRDWGADDFDAHGLHRQNIYRCFNLADIAINNDVEDERFSEVLFNKFIRYYALMLSPGCVQPTPQETYMHLAYSLSLRSTCISRQVGAVITDLEDRILSLGWNEVPEGQIGCGLKVKKDYTDKENPLFEMEIWDNVITAEDLAVWDDEDSICVKDILSRIEIKTKLKSVSLTPEERADVLKALRIKRLEYSRSLHAEENAILQVASRGGVGLKDGTIYVTTFPCELCSKKIYQVGISKIYYTEPYPNSISEKVILKDGIRNIKILQFEGVKSYSYFKLFKPGFDKKDAQMLEGRGI

SEQ ID NO: 117 - protein, 291 aa, synthetic construct
  REGION 1..291: note = pYY-BEM4.8; tr|A0A1G0PGF4|A0A1G0PGF4_9BACT polypeptide sequence
MKHNNQLRKEIEKLLGQNSIIKNDELKKLQKEYKIETDELLISFLPYAAEFAKVPISKYKVGAVVLGKSGNIYFGSNMEFEAGALSATVHAEQSAVNNAWLNGETGINKIAVTAAPCGYCRQFLNELTTAKQLHVLLKDKNLEAAKVFKLTELLPEAFGPRDLEIEGGLMKVENHKLKIENINDELINAALEAANKSYAPYSKNYSGVSIQLSDGTIFSGRYSENAAYNPSLLPFQSALAFMNMNTKKGSNNKIVDAVLVEAVSNISQKDAAGTLLNSISKTKLRYYKIKN

SEQ ID NO: 118 - protein, 398 aa, synthetic construct
  REGION 1..398: note = pYY-BEM4.9; tr|A0A0P4WGY5|A0A0P4WGY5_9EUCA polypeptide sequence
MEENSSATSQPKCASRTKQGGNDLSTDMSNLSVGETKRTDFLPWDDYFMAVAFLSAMRSKDPSSQVGACIVNADKKIVGIGYNGMPIGCSDDELPWNKESLDPLQTKYMYVCHAEMNAIMNKNSSDLAGCCVYVALFPCNECAKLVIQAGIREVVFFSDKHQQKPETVASKKMLNMAGVAYRQYTPSQSKIELNLSLKEQEKSEPTADITQSSERDQNSKRKDYLSWEEYFMAMAHLSALRSKDPITQVGACIVNSKKKIVGIGYNGMPLGCNDDLMPWGNSSSNKLETKYMYVCHAGVNAIMNKNSCDVSGCTLYVALFPCNECAKVIIQAGIKTIIYASDTNKDQASILASKKMLDMAGIKYRADNLSQRKIVIDFKTIDWNSRFMNDHQNDPTCL

SEQ ID NO: 119 - protein, 259 aa, synthetic construct
  REGION 1..259: note = pYY-BEM4.10; tr|A0A3D8IG27|A0A3D8IG27_9HELI polypeptide sequence
MRKNILYFILTLFFLSGLYATSLPEDNVVSGVIYEKIDTVSAEVDHIYPMLALAIVYKDWQEKNMLNKQGHNIGLVIVDENNMPVFWVRNSVHATHNGTQHGEVRLVSNLLNCEGFNKYLDKYTLYTTLEPCIMCAGMLSMVQIPKVVYAQKDLSCGNTQEIISTAKYPRYYKAFTVENGYKKDLEECFEQYKICKNDSITDFLVNDSAKEIFRKASNDLQDYKVKFKENRRVIKVAQEFLQNIQTKDNLDVLQCPKNM

SEQ ID NO: 120 - protein, 256 aa, synthetic construct
  REGION 1..256: note = pYY-BEM4.11; tr|A0A351C8C4|A0A351C8C4_9BACT polypeptide sequence
MNELTKQSEHLRNEALRIATRSYVPYTGQQEGVIILLENGDLIPGVRVENASFQLTIPALQNALSTMYALQRTDISMIVSSIPFTDSDLAYTGGMAEIAWEMVGASLLLVAGAHIPEAGTFIDPARGENLLDVSREAALNAFIPESDFPVGSAIQTSDDVVIDGCNVEHSDWSKIICAERNVLSTARSYGLGQITTIYVSCPKEPGGTPCGACRQVIVELAPDATVWMDRGNQEPIAMKATKLLPGHFTGNVLKKQ

SEQ ID NO: 121 - protein, 301 aa, synthetic construct
  REGION 1..301: note = pYY-BEM4.12; tr|A0A1G6V2K7|A0A1G6V2K7_PEPNI polypeptide sequence
MPIVRVNEIGARLPEDWEALETAIWQAYVSREDLPDAGELDLTLVDDATIQELNKTHRQLDKSTDVLSFPMYDDRDDLAADVQAGLPVILGDIMISVPTAERQAQAYGHSFKREMAYLLVHGLLHIAGYDHMSAEEKSAMRRAEEAILADVDVPRDTAPSKTAAVLDEADVQALIDAARAARLQAYAPYSGYAVGAALLAADGRRFCGVNVENASYGATCCAERTALFAAVTAGARDFIALALVTEGDEPAPPCGLCRQALAEFSPDLAIYLAGPTGETYRRTSLAALFPEAFSLSTKESV

SEQ ID NO: 122 - protein, 528 aa, synthetic construct
  REGION 1..528: note = pYY-BEM4.13; tr|F2NP91|F2NP91_MARHT polypeptide sequence
MPVMETHALEARFKEALARLCPEGRLLAAVSGGGDSVALLYLLKAAGRDTIVAHLDHALRPDSAADAAFVEKLAQRLGFPLETEHVDVRALAHRKRINLEAAAREVRYAFLARVARRWKARCILTAHTLDDNAETVLLQILRGAGRGLGIRPLQRRVARPLLEFSRAELRAYLEARGARWLEDPTNRSLELDRNYLRHAVLPRITARFPHALEALARFSQAQQADDWALEALSARHLIPDRRWPVPAYRALPLERAPEALRRRAIRGVLEALGVRPEARLVADVEAALGGRAQTLPGGVVVRRQRGTLFFIPPTVRFPKVQPPAGLEARPPRPGDYLVFPYGRKRLVDFLNERGVPRELKRRWPVGAVGAEVRWVYGLWPEPDEDRYMRRALVLARAAARQGEVPIGAVLVRDGAVLAEAANAVEASRDATAHAELLALRTALRRVGEKVLPGATLYVTLEPCPMCYGAILEARVARVVYGVENLKAGAFTVHGLEPRVALEAGRVEGECAKVLKDFFARLRPGRDGA

SEQ ID NO: 123 - protein, 226 aa, synthetic construct
  REGION 1..226: note = pYY-BEM4.14; tr|A0A316TX77|A0A316TX77_9BACT polypeptide sequence
MINGYTPYSGNQNTCYVKGESGTFYPGVRIENVSYPLTISSVQAAVCSCLANSDNPVEYYTGDHQPELLQVWADEYDMKPGGKLPDSPLKLFDPLVPSIPDIKKELDVLTEKSVTPNSGFPVSALLQTEKGYIRGVNIELSSWALGLCAERVAISRALTAGYTQFKSIHIYAPEADFVSPCGACRQVLLEVMPDADTELYHGDGTLSKHIVSDLLPFGFTSHKLKK

SEQ ID NO: 124 - protein, 321 aa, synthetic construct
  REGION 1..321: note = pYY-BEM4.15; tr|R6VYG3|R6VYG3_9FIRM polypeptide sequence
MIHKGTQTIETKRLILRAFTPDDAEAAFENWMSDPKVTEFLRWKTHADISDSRKIVNEWANGSADPEFYQWAIVPKDVNEPIGTISVVDRNDALGIFHIGYCIGSKWWHKGITSEAFSAVIHFLFEEVGANRIESQHDPENIHSGDVMKKCGLTFEGTLRQADFNNRGIVDACVYSILQSEWQNNTSVWQRLYNAALTVQNDRVVSPFIDAGGVAAALMTKKGNIYTGICIDTASTLGMCAERNAVANMLTNGESRIDKIVAVMPDGKVGAPCGACREYMMQLDRDSGDIEILLDLETEKTVRLKDLIPDWWGAERFGDTE

SEQ ID NO: 125 - protein, 229 aa, synthetic construct
  REGION 1..229: note = pYY-BEM4.16; tr|A0A3C1HZ18|A0A3C1HZ18_9BACI polypeptide sequence
MGDIMENWNELSEPWKRCFLQAWKAYCHGSIPIGAVLVDSEGEIFLEGRNRVHELTAPEGQLCDCRIAHAEMNVLVQVKTSDYEKLSGATIYSTMEPCIQCFGAIILSRIKNISFAAIDDKLAGATTLEDRHGFIKSRNLNIAGPFSHLGEIQIILRTDFLLRIFDSEYADPLIAAHEKDYPIGVALGRHYHRNNRLQVAKKETIPFGELFNEFSFDIKRAREGYTLGK

SEQ ID NO: 126 - protein, 205 aa, synthetic construct
  REGION 1..205: note = pYY-BEM4.17; tr|A0A1M6KV24|A0A1M6KV24_9BACT polypeptide sequence
MEASQQNILLKIEGKGPVAEINFTVTLPEWLVEQVQSGSTVFLTQKEKMRFVLELARKNVAQETGGPFAAAVFSLESGELVSAGVNVVVESRCSSAHAEVVALSLAQKAVDSHDLGAAGLPRMVLVSSAEPCAMCMGAIPWSGVKQVICGARDEDVRSVGFDEGAKPLEWVEDFAERGIEVIRDVLREEATEVLWDYRERGGEIY

SEQ ID NO: 127 - protein, 207 aa, synthetic construct
  REGION 1..207: note = pYY-BEM4.18; tr|A0A2U0T9B4|A0A2U0T9B4_9RHIZ polypeptide sequence
METAELISRLLDVIEKDIAPVTAKGVARGNKLFGAAILKKSDLAVIVAETNNEIENPLWHGEMQAIKRFFELPADQRPATRDCLFLATHEPCSLCLSGITWSGFDNFYYLFSHQDSRDGFAIPYDIQILKSVYAVPEPETGTVSPARDLYNRSNDFWTSHGLQDMIAGLARSNREALLARIDDLNALYAELSERYQRDKGGKGIPLP

SEQ ID NO: 128 - protein, 231 aa, synthetic construct
  REGION 1..231: note = pYY-BEM4.19; tr|A0A2K9PN08|A0A2K9PN08_9FLAO polypeptide sequence
MSDKKESKIKISKTSESIELDEIHSLLSYSIVQKFWENDDRNGRGYNVGVILVDENKNIVDWDINSVNKTENSTQHGEMRLISRYLDKDELYSLKGYTMYPTLEPCAMCAGMMTMTNVYRTVNGQMDYFYSKALERLSIDTRECGGYPPYPRTVISEISPSSISTRLDAEYKQYTNAGNKPIITKFLSTYKAKTIYDDAFNQFINFKCKFPENKTKYENAIKFYNSLPESI

SEQ ID NO: 129 - protein, 330 aa, synthetic construct
  REGION 1..330: note = pYY-BEM4.20; tr|F4PWM7|F4PWM7_CAVFA polypeptide sequence
MRFSLSLLFVILSVLLAGVLACKDPYNPETVDYGQCASATKANYEVRSDSKVLTPADLPADELAVHESRMRHIIDIARVNNKKFVSSIYFPNGTLACIGINTGKPNMIAHGEIVAIQNCTEIHGISMYTNYSIYTTGEPCSMCASAILWSRFKTVVWSTYNSDLYCKICMSNIPIDSSYIFSRAYGLGIEAPVAIGGVVKAEGDAWFGTYCNRPTSIYYIAPKCACQDPAKVSPLKFTQTRTTVWVEGGDKVVTQWNAIISNPSNSTIVDPPIVISPSVVFKGAPWGISAASEPNTYKLSYNKVLFPGQTFSFGYSVYGLEEVAFTALEA

SEQ ID NO: 130 - protein, 193 aa, synthetic construct
  REGION 1..193: note = pYY-BEM4.21; tr|U7QZM1|U7QZM1_PHOTE polypeptide sequence
MNKTRRKLLATLGIMSISMSFIAQAGEKKTQVINNILSKQEITEHEKYMREAIKEAIKNPKHPFGAVIVNRNNGEILSRGVNTGRNNPILHGEIQAINHYITQYGNQGWENVALYTTGEPCSMCMSALVWIGIREVIWATSISVIRNSGIRQIDISAHEIAERASSFYNPITLVGGILANETDKLFLERKRGN

SEQ ID NO: 131 - protein, 319 aa, synthetic construct
  REGION 1..319: note = pYY-BEM4.22; tr|A0A081CH48|A0A081CH48_PSEA2 polypeptide sequence
MASRRHLLATQVTGNHRKLSLWHLRGWLSPYTKLVDAVYFLTTNSFYHSLQTPPVQSITMLLSSIITSLALAAQASAYREGLHPEFQSGLSINSVPATDRDHWMRLANSAIYYPPVSHPCPQAPFGTAIVNTTSNELICAIANRVGSTGDPTQHGEITAIQHCTNVMRKKGLSPQEIIAAWKQLSLYTNAEPCTMCLSAIRWAGFKEVIYGTSVGTISENGRNQIYIPSNLVLEKSYSFGHATLMLGNILTHETDPFFQHQFNESAPCPVGCERTQVGEARVKTCEPVPNWQKLVRLEYSEDSRVGSEPVAHTPLHLEL

SEQ ID NO: 132 - protein, 203 aa, synthetic construct
  REGION 1..203: note = pYY-BEM4.23; tr|A0A3D3HMU1|A0A3D3HMU1_9GAMM polypeptide sequence
MDYSDAILGAITSIRRNSKQPGVNVTDNVTDSSTQYNNDEYWMRRALALAREAGEAGEIPVGAVLVKDNQQVAGGFNQPIRSHDPAAHAEILTLREAGAVLGNYRLIDTTLYVTLEPCMMCAGALVHSRIKRLVFGAAEPKTGAAGSFIDLLTLPRLNHYMEVTGGVLGEECSVLLSDFFRRRRAEKKALKRQNSESGSDSAS

SEQ ID NO: 133 - protein, 270 aa, synthetic construct
  REGION 1..270: note = pYY-BEM4.24; tr|A0A1N5WT13|A0A1N5WT13_9ACTN polypeptide sequence
MLEKIERRLVAAAEAVVRSPSTGDAHTVAAAAMDANGDIYSGVNVFHFTGGPCAELVVIGSAAAANAPPLITIVAVGDGDRGVIAPCGRCRQVMLDLHPDVFVIVPTGDGQLAAKPVRELLPFGYVARTGSTAPRVVYFHPRHYDTISSGLKTATVRFQDSVQTGPAVFVFDDGESIRRLDAVVEKVESRRLDHLTEEDAHHEALPDSDALRDAIKTQYPMLGDGDVVDVATFRLTAISAPDPDPRSSYPPAVSRCNPAGPRADLLVGQS

SEQ ID NO: 134 - protein, 257 aa, synthetic construct
  REGION 1..257: note = pYY-BEM4.25; tr|X0SAC5|X0SAC5_9ZZZZ polypeptide sequence
MTKDGRVIASAHDTEVTDQDSTAHAEINAIRKASKIYRKDLTGCLIISTHEPCPMCTGSIIWSNISKVVYGVSIRDSIKAGRDMINLSCKEIIKKPNAEINIYDGILKKECLKLYNNDTRKLVKKFRKYEWINIEENLLNKRMQWFENNKTMIRKLKGNDLEKAYHLILMKIGIKRSEAPIVKKSESKIIFHSKNYCPSLEACIILDLDTREVCKEIYERPTEELIRRLNSKLRFTRNYDCIRPYSDYCEEIIILEK

SEQ ID NO: 135 - protein, 154 aa, synthetic construct
  REGION 1..154: note = pYY-BEM4.26; tr|A0A3B8IC10|A0A3B8IC10_9BACT polypeptide sequence
MPSHEDFIHQCLELGKEALLQGNPPVGSVIVWQDQVIGRGIENGRSSGDITQHAELLALQEAVATGQRDKLKEAIIYSTHEPCVMCAYPIRQYKIPTVVYSVAVPELGGHTSSWHLLTTEDVPKWGKAPKIITGISAEEVEALNAAFQDSLKKG

SEQ ID NO: 136 - protein, 180 aa, synthetic construct
  REGION 1..180: note = pYY-BEM4.27; tr|A0A2N9P8B9|A0A2N9P8B9_9FLAO polypeptide sequence
MFIFKLISPPVSIEVYQDKIIQKLYICFMENIFTDEYFMKKALQEAETAFQQGEIPVGAVIVIDNRIIARSHNLTEMLNDVTAHAEMQAITASANFLGGKYLKDCTLYVTLEPCQMCAGALYWSQISKIVYGATDEQRGYRAMGAQLHPKTKVISGIMQNECTHLMKDFFKQRRSKSTKD

SEQ ID NO: 137 - protein, 178 aa, synthetic construct
  REGION 1..178: note = pYY-BEM4.28; tr|K1KX30|K1KX30_9BACT polypeptide sequence
MVKNPVNNNELYFGKHSEIPMNEEQKAYMKMAVDLSRSGMESGKGGPFGCVIVKDGKVIGIGSNSVLETNDPTAHAEIVAIRDACRNLGHFQLDGCEVYTSCEPCPMCLGAIYWARPSKVFFANDKRDAAEAGFDDDFIYQELELPYEKRKIPFEQGMQDTAKEVFQEWILKEDKTLY

SEQ ID NO: 138 - protein, 196 aa, synthetic construct
  REGION 1..196: note = pYY-BEM4.29; tr|R4XI84|R4XI84_TAPDE polypeptide sequence
MSSEIEPPSTDVHKHAVAEAADESGAADAFMQIALQQAETALLNKEVPVGCVFVHQPTGTVLATGANQTNASLNGTLHAEFVAIESILRDHPPSIFRESDLYVTVEPCVMCASALRQLQVRKVYFGCGNDRFGGCGSVFSIHSDASKTGDAAYMVESGIFRKEAIMLLRRFYLLQNESAPKPALKSTRVLKEHFDE

SEQ ID NO: 139 - protein, 212 aa, synthetic construct
  REGION 1..212: note = pYY-BEM4.30; tr|A0A239CVF7|A0A239CVF7_9DELT polypeptide sequence
MSPASKKHFPSLFSFLLLTIGLICGTAHAQPQGHTADDTAATLANASLKEHEPFIRRCYQLAIDAGKKGNHPFGALLVHKGKIVLEAENTVLTDNDFTNHAEMNLIAEAARTLSRQIIPEATVYTSCAPCAMCTATLAMAGFTRIVYGVSHDALNKRFGLKGKSVSCPALFKTMGMELEFVGPVLEKEGLRVFDFWPEKDPHAQMLKKQARK

SEQ ID NO: 140 - protein, 320 aa, synthetic construct
  REGION 1..320: note = pYY-BEM4.31; tr|A0A1Q3NME1|A0A1Q3NME1_9BACT polypeptide sequence
MTEFNYDWAKLAFSSKRPLTNLKATFIIAPREISEKRFTQLLKEYLPKGDILLGISKEDYVEGLEGQPQFAMLQQKTLQKLIDKVNDASAHKVYTLRYFQRELPAIIEKLTPPRVVGIHGSWHHSFHTLPIYYLLSEKRIPYQLVAAFSDEDEARAYEVATDKKIVRPTLEGSFDDTTVLQLTDEVAKSSYDYGFQTGAILAEKVNGVYQPVAAGFNKVVPYQTYALLNGASRETNFSPANDMNHYDTIHAEMQILVEAAKQGISLKDKTLFVNLMPCPSCARTLSQTELSEIVYRIDHSGGYAVDLLTKVGKDIRRIVY

SEQ ID NO: 141 - protein, 180 aa, synthetic construct
  REGION 1..180: note = pYY-BEM4.32; tr|A0A2G6N4N7|A0A2G6N4N7_9DELT polypeptide sequence
MKERTVSYSDRHFMAEALEMAESALTQGEFPVGCVIADGTAVVARGHRTGTTAGAVNEIDHAEINALRHLGLAGEHLDRTDLTIYSTMEPCLMCFAAIVLSGINRIVYAYEDVMGGGTGCDLTGLPPLYRDAPLTLVAGVRRRASLNLFRRFFTDPENGYWAGSLLSRYTLNQTKDSHRL

SEQ ID NO: 142 - protein, 156 aa, synthetic construct
  REGION 1..156: note = pYY-BEM4.33; tr|A0A0G0RBB8|A0A0G0RBB8_9BACT polypeptide sequence
MQSVQYNKLTHLQRRALDEAEQVLENSYNPYSHFYVGACLISEDEQLIAGTNFENAAYGSAICAERAAVLRANAMSIRRFRGIAIIARGEDFNTTEVTGPCGSCRQVLYEISQVSGCDLQVILATSKKDKIVITTIRELLPLAFGPLDLGVDIGKY

SEQ ID NO: 143 - protein, 217 aa, synthetic construct
  REGION 1..217: note = pYY-BEM4.34; tr|A0A327L2Q5|A0A327L2Q5_9RHIZ polypeptide sequence
MVTSRDGEDEAMMARCVALSRIAVGKGEYPFGAVVAREGRIVAEAINRTIRDGDVSRHAEVIALARAQKAIGRRELRECSLYSNVEPCAMCSYCIREAWVGRVVYALGSPVMGGVSKWNILRDDGLSGRMPQVFDAAPEVVSGVLVEQAQAAWRDWSPLAWEMITLRGLMTDPSARPECRTRAARPRSLWHHLVALIERPPRPYVDPTSAAEGHADL

SEQ ID NO: 144 - protein, 162 aa, synthetic construct
  REGION 1..162: note = pYY-BEM4.35; tr|S2DR30|S2DR30_9BACT polypeptide sequence
MKMKKKIEITVSLEVIQKSEWSKEDRSLIERAIHAVEHAHAPYSNFMVGTALLLDNGQIFSANNQENVSFPVGICAERAVLSYAMGNFPNNRPVKLAVVAKRRSDSTWATVTPCGLCRQTINEYEVKFGHPIEILMLNPGEEILKASGIDQLLPFRFNDLNS

SEQ ID NO: 145 - protein, 153 aa, synthetic construct
  REGION 1..153: note = pYY-BEM4.36; tr|A0A369QGF1|A0A369QGF1_9BACT polypeptide sequence
MEEHEKWMHWCLNLAQQALQQGDFPVGAVVVQKGKLIGQGVEAGQLKKDITCHAEMEAIRDARQTINTADLQNCILYSTHEPCIMCSYVIRHHKISRVVVGTTVPEVGGSSSAYPLLSAPDISIWVAPPHLVTGVLAEACQALSQAYKQKFKK

SEQ ID NO: 146 - protein, 159 aa, synthetic construct
  REGION 1..159: note = pYY-BEM4.37; tr|A0A1W6X4U4|A0A1W6X4U4_9RHIZ polypeptide sequence
MTNPSRQERWDRRFLELAKVFGTWSKDRSAGTGCVIVGPDRLLRASGYNGFARGIDDEVPERHERPAKYSWTEHAERNAIYNAAKLGISLDGCTAYVNWFPCIDCARAIVQAGIVRLVGLHPDHADQRWGSEFKFATEMLRESGIEIILYDIPELAARK

SEQ ID NO: 147 - protein, 490 aa, synthetic construct
  REGION 1..490: note = pYY-BEM4.38; tr|A0A238BW09|A0A238BW09_9BILA polypeptide sequence
MEEMARKIRTKAKKANSYCNTMTFLISKASIVLLKAECKRIELTVVIFRFLIKMNASEPNNELCDMTVIKSMLKITHVIFDLDGLLIDTEVVFSKVNQCLLSKYNKKFTPHLRGLVTGMPKKAAVTYILEHEKLSAKVDVDEYCKKYDEMAEEMLPKCSLMPGVMKLVRHLKTHSIPMAICTGATKKEFEIKTRYHKELLDLISLRVLSGDDPAVKRGKPAPDPFLVTMDRFKQKPEKAENVLVFEDAANGVCAAIAAGMNVIMVPDLTYMKIPEGLQNKINSFSDNLIISNDLNVALMSLKKELSEEEVHFLNRAFEIAVDAVLNNEVPVGCVFVFEGQEVAFGRNDVNRTKNPTYHAEMVALKMMKQWCMDNGRDLEEIMRRTTLYVTLEPCIMCASALYHLRLKKILYGAANERFGGLVSVGTREKYGAKHFIEIMPNLSVDRAVKLLKEFYEKQNPFCPEEKRKVKKPKKSGNNNDNSDDAVALNV

SEQ ID NO: 148 - protein, 159 aa, synthetic construct
  REGION 1..159: note = pYY-BEM4.39; tr|A0A1J5H6Z0|A0A1J5H6Z0_9BACT polypeptide sequence
MAYQPSEKFMQMAIDKTREGVLSGQTPFGACIVKDGKVVACEHNTVWQDTDITSHGEVHTIRAACKAIGSIDLSGCILYSTCEPCPMCFSAIHWARIDTVVYGAFIADAQDAGFNELTISNEKMKEFGGSPVNFISGFMRDENVALFKLWKEQGANNVY

SEQ ID NO: 149 - protein, 168 aa, synthetic construct
  REGION 1..168: note = pYY-BEM4.40; tr|A0A3C2D945|A0A3C2D945_9BACT polypeptide sequence
MKTTEIRIIVHEYQNIDELTENDQYLLHEARRITEFAYAPYSGFHVGAAILLGNGMIVKGNNQENSAYPSGLCAERVALFYANANYPDSEVKTIAISAAKNGILVNDPIKPCGGCRQTLSEAEVRFGSPIRIILDGQDSILVLHGVESLLPLSFSKKDLASPLAATGR

SEQ ID NO: 150 - protein, 214 aa, synthetic construct
  REGION 1..214: note = pYY-BEM4.41; tr|A0A1I7EYS3|A0A1I7EYS3_9BURK polypeptide sequence
MKFKLDPSRPPDEDDYYLGVALAVRRKANCTGNRVAAVIVKNKRVIATGYNGVPEDMPNCLDGGCLRCSNPGGQFKSGTRYDLCICVHAEQNALLTAARFGISVEGAHLYTTMQPCFGCAKEILQAKIEKVFYLHPWVPTDVDPVMDAAMKAEYAKIIGKLKVKKLDFDDPVATWAVTTMRQAALASDKNPDKKTPPKTAKKKVAKKKSRTSPR

SEQ ID NO: 151 - protein, 155 aa, synthetic construct
  REGION 1..155: note = pYY-BEM4.42; tr|H8GQX8|H8GQX8_METAL polypeptide sequence
MNHEHFMRRAIELARQAPQYPFGAVIVRRDDGQCVGQGFNRSDLNPTYHGEMVAINDCAVRHCAEDWRGFDLYTTAEPCAMCQGAIEWAGIGRVFYGTSIPYLQKLGWWQIDLRAAEVSARAVFRDTLIVGGILETECNALFAAARRGCFGTGSE

SEQ ID NO: 152 - protein, 156 aa, synthetic construct
  REGION 1..156: note = pYY-BEM4.43; tr|A0A0S8HZN3|A0A0S8HZN3_9CHLR polypeptide sequence
MDEHDIRFLRASFDVARNARKNGNHPFGALLVDEHGRIVMEAENTVITAKDCTGHAETNLMREASSKYDSDFLANCTIYTSTEPCPMCAGAIFWSNVRRVVYGLSEESLYEIAGRGSEEVLFLSCREIFERGKKLIEVIGPLLEDEAREVHMGFWR

SEQ ID NO: 153 - protein, 193 aa, synthetic construct
  REGION 1..193: note = pYY-BEM4.44; tr|E3SF31|E3SF31_9CAUD polypeptide sequence
MKPTTVLQIAYLVSQESKCCSWKVGAVIEKNGRIISTGYNGSPAGGVNCCEHAEEQGWLLNKPKPVLIPGHKSECVRFSQVDRFVLAKAHREAHSAWSKNNEIHAELNAILFAARMGSSIEGATMYVTLSPCPDCAKAISQSGIKKLVYCETYDKNIPGWDDILKNAGIEVFNVPKRSLDKLNWENINEFCGE

SEQ ID NO: 154 - protein, 330 aa, synthetic construct
  REGION 1..330: note = pYY-BEM4.45; tr|F8AAC6|F8AAC6_THEID polypeptide sequence
MIRAPWHEYFMLLAKIVALRSGCNSRPSGAVIVKNKRILATGYNGPMPGAWHCTDRGPGYCFRREKGIPDIDKYNFCRATHAEANAIAQAARFGISVEGASLYCTLAPCYVCLKLIASAGIKKVYYEHDYGSRDFERDQFWKEAIKEAGLEKFEQITVSQEVMEQLQEILPYPTSKRRLAPTEFLDEFEDGKKYGVPSIEVLFNKLNYLTRQALKDITFVIEKTTVTEEPEGISFYLSGKMVELSELINTVKKQINADQNFYFLAKHNAIEAKIEILREAENIRLKAFLNECPLESFKRIAESLDYILYQVSNSLSLPTRLELSVNLLRI

SEQ ID NO: 155 - protein, 158 aa, synthetic construct
  REGION 1..158: note = pYY-BEM4.46; tr|A0A2H4ZNK4|A0A2H4ZNK4_9EUKA polypeptide sequence
MKKQLSRKIQEEWMSRLLRNAYDAGTYGEVPIAAVILNESGQCIGWGRNCREKDQNPLGHAEIIALRQASYLKKSWRFNECTMLVTLEPCPMCAGALLQARINHIIYGASDYKRGGFGGVLDLSKNSSAHHKIEITRGVKSIQSCQLLETWFRRRRRV

SEQ ID NO: 156 - protein, 176 aa, synthetic construct
  REGION 1..176: note = pYY-BEM4.47; tr|A0A239N5N1|A0A239N5N1_9PSED polypeptide sequence
MEGRAGIIPFDEGGAAMGPAEEDSPMQHLAYMREALALARANVEAGGRPFGAVLVRDGEVIARAANGTHLDHDPTAHAELLALRAAGRALGSPRLDGCVVYASGHPCPMCLAAMHLSGVSAAYYAYSNADGEPYGLSTAAVYAQMAQPVEWQSLPLQALRPEDEEGLYGFWRERRP

SEQ ID NO: 157 - protein, 199 aa, synthetic construct
  REGION 1..199: note = pYY-BEM4.48; tr|A0A328VTR2|A0A328VTR2_9PSED polypeptide sequence
MHPEHLALLQQAPASTHADDTWARLCCEQALLAVEEGCYAVGALLVDGAGELLCSGRNQVFAPAYASAAHAEMRVLDQLEAEHAQVDRRSLTLYVSLEPCLMCYGRILLAGITRVRYLARDRDGGFALRHGRLPPAWANLASGLSVVQAKADPYWLDLAEHAIGRLQDRQTLRQRVIRAWRGQRTLTDEFSSTKRTHSG

SEQ ID NO: 158 - protein, 402 aa, synthetic construct
  REGION 1..402: note = pYY-BEM4.49; tr|A0A103YG48|A0A103YG48_CYNCS polypeptide sequence
YIRELHASSLRRDEHEIQNPKILVIVDRLSSPSLHVSLSLSLSLVIFPPFIPLNQTPTHMENAKVVEAKDGTIAVASAFSGHQEVVQDRDHKFLTRAVEEAYKGVECGDGGPFGAVVVHKDEVVASCHNMVLKHTDPTAHAEVTAIREACKKLNKIELSDCEIYASCEPCPMCFGAIHLSRIKRLIYGAKAEAAIAIGFDDFIADALRGTGFYQKAHLEIKQADGNGAMIAEQVFEKTKAKFAIDHKFLTRAVEEAYKGVECGDGRPFGALVVHKDEVVVSCHNMVLNYTDPTAHAEITAIREACKKLNRIELSDCEMYSSCEPCPMCFGAIQISRIKRLVYGAKAEASIASGIPIGDFISDALKGTGFHEKANFEIKQADGNGAMIAEQVFERTKAMFPKR

SEQ ID NO: 159 - protein, 195 aa, synthetic construct
  REGION 1..195: note = pYY-BEM4.50; tr|W5M1M8|W5M1M8_LEPOC polypeptide sequence
NSSTRESRVMAQMEINGGASPPKKPGKGQSAADQDMITGLINKALQAKEFAYCPYSNFRVGAALMTNDGRVFTGCNVENACYNLGVCAERTAILKAVSEGYESFRAIAVSSDLQDQFISPCGACRQVMREFGTGWDVFLTKVDGSYVRMTVDELLPMSFGPDDLKKKKVFSLQNGHEVSTQFYTHSPCEAGENNN

SEQ ID NO: 160 - protein, 134 aa, synthetic construct
  REGION 1..134: note = pYY-BEM4.51; tr|A0A3N5YPZ2|A0A3N5YPZ2_9ALTE polypeptide sequence
MSNSETEHIQALVDAAQAAQKQSYSPYSSFQVGAAIFADDGNTYSGCNIENVAYPLGQCAEATAIGMMIMQGAKRIEDIMIASPNDQVCPPCGGCRQKISEFGTAETKIHMVTRSGEVSTVTLGELLPLAFDSL

SEQ ID NO: 161 - protein, 162 aa, synthetic construct
  REGION 1..162: note = pYY-BEM4.52; tr|A0A2A9NC86|A0A2A9NC86_9AGAR polypeptide sequence
MTNSTLSNEDRTRLIQGAFQARKKTYSPYSNFPVGAALLTTDGRIIEGANIENASYGGTICAERTAIVKAVSDGYRHFAGIAVTTKMPTRVSPCGICRQVLREFCSLDMPVLLVPGDYPQRNPVDDDGADKPGVITEGGVRETTLGALLPDSFGPENLPPRA

SEQ ID NO: 162 - protein, 163 aa, synthetic construct
  REGION 1..163: note = pYY-BEM4.53; tr|A0A2D6RD43|A0A2D6RD43_9GAMM polypeptide sequence
MNIENLITENDETLIRRCIELAGESVKNGDKPFGALLAKDGNIIFESSNNAKTKVPYHAEILTLMDAQDKLNTTDLSDYALYSNCEPCPMCSFMIREYKLDKVVFSVHSPYMGGQSRWNILEDDVLTRFKPYFSKPPNVVGGVLESEGKRIFDKVGLWMFGKE

SEQ ID NO: 163 - protein, 204 aa, synthetic construct
  REGION 1..204: note = pYY-BEM4.54; tr|A0A0H3AVL6|A0A0H3AVL6_BRUO2 polypeptide sequence
MHAKGYSQQERRIIPFANRFRFRELCSNKSLHGLRAKFPEQYTKWDPMRKAASITKANSATPMDIALEEAHAAGERGEVPIGAVIVRDGEIIARAGNRTREFNDVTAHAEILTIRQAGEMLGSERLIDCDLYVTLEPCAMCAAAISFARIRRLYYGASDPKGGGIEHGGRFYTQPTCHHAPEIYPGFCEADARKILKDFFREKR

SEQ ID NO: 164 - protein, 165 aa, synthetic construct
  REGION 1..165: note = pYY-BEM4.55; tr|A0A242H531|A0A242H531_9ENTE polypeptide sequence
MFIVKNNIEVIQQQAELDAKFMKQALKLAKDASNNGNEPFGAVLVKNDKVILTGENQIHTESDPTYHAELGIIRDFCTSQKITDLSEYTLYTSCEPCCMCAGAMVWSNLDRMVYGLGHDELAEIAGFNIMIGSEEIFSKSPNRPEVAKGVLKEAAVPVYVDYFQR

SEQ ID NO: 165 - protein, 181 aa, synthetic construct
  REGION 1..181: note = pYY-BEM4.56; tr|A0A2R6XZE2|A0A2R6XZE2_9BACL polypeptide sequence
MSGRISWHEYFMAQAKLIALRATCTRLMVGAVIVRDRRVIAGGYNGSIAGDEHCIDVGCKVRDGHCIRTIHAEQNALMQCAKFGVSTDGAELYVTHFPCLNCTKLLIQAGIRHIYYEVPYRVDPYAIELLEKAGVGTTQITVDLNAYVQVMSKVSTDPALTYVPESKAQKDEYGQSVGKIV

SEQ ID NO: 166 - protein, 173 aa, synthetic construct
  REGION 1..173: note = pYY-BEM4.57; tr|A0A139SHT6|A0A139SHT6_9BACT polypeptide sequence
MSEANASSESLPSRNSPVELIAEAAGKFGRRPTWDEYFMATAVLISTRSSCERLNVGCVIVTAGESHKNRIVAAGYNGHLPGSPHTSRMRDGHEQATVHAEQNAISDAARRGSSVEGCTAYVTHYPCINCAKILASAGIAKICYRLDYHNDPLVKPMLAEAGIEIVQLGEAAS

SEQ ID NO: 167 - protein, 170 aa, synthetic construct
  REGION 1..170: note = pYY-BEM4.58; tr|A0A261DBH2|A0A261DBH2_9RICK polypeptide sequence
MVMKKKLITVKRSTEFNNFFMEEALKQAQFALDKNEIPVGAIIVNRITNKVIAKAHNIVEQTKNPVLHAEIVAINQSCQILSSKNLSDCDMYVTLEPCVMCSGAISFARIGRLFYAANDPKQGAIENGGRFFNSKSCFYRPEIYSGFSAKISENLIKEFFYNVRYQKCNP

SEQ ID NO: 168 - protein, 146 aa, synthetic construct
  REGION 1..146: note = pYY-BEM4.59; tr|A0A2N0XZK6|A0A2N0XZK6_9VIBR polypeptide sequence
MTDNSLHESYMRQAFELSKSALPGCRPNPPVGCVFVKDGEVVSSGFSQPPGNHHAEAGAIAAYTGSYDGLVAYVTLEPCSFQGRTPSCAKALVRVRPEKVYVAILDPDTRNSGAGIKILEDAGIDVEVGLLGEEVASFLNPYLIRN

SEQ ID NO: 169 - protein, 159 aa, synthetic construct
  REGION 1..159: note = pYY-BEM4.60; tr|A0A1V5R0F9|A0A1V5R0F9_9BACT polypeptide sequence
MTKKETTKLHALDDFCMKKALLLAKRAFRADEVPVGALVVDSSNKVIGRGYNQVEKRKSQRAHAEQLAIEQACKKIGDWRLEGCTLYVTLEPCTMCMGLIKLSRIERVVFGAASPLFGYQLDKNRKSQLYKKGVIKIRKGVGKATAAALLKDFFKNKRM

SEQ ID NO: 170 - protein, 167 aa, synthetic construct
  REGION 1..167: note = pYY-BEM4.61; tr|A0A2W0H8Y3|A0A2W0H8Y3_9BACI polypeptide sequence
MKNNGRLDHEYFMTEALQEAKEAGQRGDLPIGAVIVHNGRIIARGSNMRKTAGIKISHAENNAMHNCAPYLMKHASECVIYTTLEPCIMCLTTLVMANIDSIVFAADDKYMNMKPFIDANSYIRDRIHQYKGGVCRGESEALLRKYSPYAAELALNGTHPHHRKGGA

SEQ ID NO: 171 - protein, 165 aa, synthetic construct
  REGION 1..165: note = pYY-BEM4.62; tr|A0A261BDB7|A0A261BDB7_CAERE polypeptide sequence
LYKLYIFRMTTTKANLTQFEQELVDKAVGAMEKAYCKYSGFKVGAALVCEDGEIIIGANHENASYGATICAERSAMVTALTKGHRKFKLLAVATELEAPCSPCGICRQYLIEFGDYKVILGSSTSDQIIETTTYGLLPYAFTPKSLDDHEKEAEERNHQEGEKKH

SEQ ID NO: 172 - protein, 162 aa, synthetic construct
  REGION 1..162: note = pYY-BEM4.63; tr|A0A2E1PHI6|A0A2E1PHI6_9GAMM polypeptide sequence
MKELLIHSWLMLNSNSKLIMERVIELSEINLKNGKIPIAAVIVDKKNYEIISESQNEDSPIGHAELLAITKALKKLNTNRLDSTNLFVTIEPCPMCAYAISKCHINRLYFGSEDEKGGGVINGPRIFESHNLKKIDYVSHCYHEKTTQLMQSFFQLKRNQQL

SEQ ID NO: 173 - protein, 133 aa, synthetic construct
  REGION 1..133: note = pYY-BEM4.64; tr|A0A378LUA7|A0A378LUA7_9GAMM polypeptide sequence
MDTIIKKMISNAHNTLAHSYSPYSKFSVASCICTDKDNFYTGVNVENSAYGLAICAETSAISAMVTAGEKRIKSMVVMAGTNILCSPCGACRQRIYEFSTPDTLIHLCDKNSILRTFKINELLPEAFKFDFNP

SEQ ID NO: 174 - protein, 370 aa, synthetic construct
  REGION 1..370: note = pYY-BEM4.65; tr|A0A139HQ78|A0A139HQ78_9PEZI polypeptide sequence
MADSLKSKPGHARHDTALIHGLSQSDVQKLSESCVDAKSKAYCPYSHFRVGCAVLLANGDVVQGANVENAAYPVGTCAERVALGTAVGAKKGDFRALAVSTDISPPASPCGMCRQFIREFCELNTPILMYDKDGKSVVMTLEQLLPMSFGPDKLLPPGQLENGLMQTQTQSSFVTRAFSTTSSRRQDDTPQVPQSHYDFFPQTFPQGPPPKTSFSPDLKQLRKEFLQLQAKAHPDLAPQDQKRRAEALSMRINEAYKTLQSPLRRAQYLLSQQGIDVEDETAKLDDSSLLMEVMEAREAVEEVEDEEQLNEIRAENNGRIEESVRVLEDAFRDNEFEKAAQEAIRLRYWVNIEESIQGWEKGNGGGILHH

SEQ ID NO: 175 - protein, 165 aa, synthetic construct
  REGION 1..165: note = pYY-BEM4.66; tr|A0A2A9FXV0|A0A2A9FXV0_9VIBR polypeptide sequence
MCNLKENKDMDKYFHFACDATIEGMREGTGGPFGATLTRNGEVVCSVANTVLKDMDISGHAEMVAVREACKKLDTLDLSDCVMYATCEPCPMCVSVMLWAGIKTCYYASTHLDAAKHGFSDQQLRDYLDGSDTSTLNMVHIEDNRDDCAKIWTEFRHLNETKNDG

SEQ ID NO: 176 - protein, 509 aa, synthetic construct
  REGION 1..509: note = pYY-BEM4.67; tr|A0A1A8AG96|A0A1A8AG96_NOTFU polypeptide sequence
MEHSDRWSRAEPGLSTSSRETRDGSTQTDCKLQGHGPRLSKVNLFTLLSLWMELFPQEQDEENGQSQIRRSGLVVVREGKVVGLHCSGADLHAGQAAILQHGASLANCQLFFSRRPCATCLKMIINAGVRQITFWPGDPEISMLTSNQTHSQRTSQSITEASLDATAVEKLKSNSRPQICVLMQPLAPGVLQFVDETSRRSDFMERMMDDDPELDSEKLFNSDRLRHLKDFCRHFLIQTDQRHKDILSQMGLKNFCVEPYFSNLRSNMTELVEVLAAVAAGMPQQHYGFYREESLSLDPHPVDVSQAVARHCIVQARLLSYRTEDPKVGVGAVIWAKGQSACCCGTGRLYLIGCGYNAYPAGSKYAEYPQMDNKQEDRERRKYRYIVHAEQNALTFRTRDIKPDECSMLFVTKCPCDECIPLIRGAGVKHIYTSDQDRDKDKGDISYLRFGSLKGVCKFIWQRSPPVSSASSLHLTNGCVGKHVRQAEQQIYKNKKLCTKGSSGSSDIC

SEQ ID NO: 177 - protein, 148 aa, synthetic construct
  REGION 1..148: note = pYY-BEM4.68; tr|A0A3E2VN88|A0A3E2VN88_9FIRM polypeptide sequence
MEKEITNMDKQKLIQMAVDGLGRSYAPYSHFHVSAALLCADGTVYTGNNIENAAYTPSVCAERCAIFKAVGDGRREFEAIAVCGGPDGVIEDYCPPCGVCRQVMREFCDPSSFRVLVAKTAEDYREYTLEQLLPDGFGPDHLTGSGER

SEQ ID NO: 178 - protein, 221 aa, synthetic construct
  REGION 1..221: note = pYY-BEM4.69; tr|A0A2D5ZRJ2|A0A2D5ZRJ2_9BACT polypeptide sequence
MARPVHLHTGERRTEEGATESRAVAAVATAITRAPRAPPRPATGRERDGPPPRRVFGGGLRVGDPSGYDRGESKPIGGPLTEKRSDWHSYFMRIAGEVATRATCDRKHVGAVIVRNRTILSTGYNGSIRGMPHCDDVGHDMVDGHCIATIHAEANAILQAARNGVMIQDGSIYITASPCWNCFKLVANAGLKRVYYGEFYRDKRSFEVARRLGIDLMHIEV

SEQ ID NO: 179 - protein, 155 aa, synthetic construct
  REGION 1..155: note = pYY-BEM4.70; tr|A0A1B8WPS3|A0A1B8WPS3_9BACI polypeptide sequence
MEGVQLIYQFQWGNLIMTVNKEDLYLIDVARNTIKTLYVDGKHHVGAAVRTKTGKIYSAVHLEANIGRVSVCAEAIALGKAISEGESEFDTIVAVRHPDPTQENQKIEVVSPCGICRELISDYGKGTNVILKNKEGYIKTVISDLLPNKYIREDN

SEQ ID NO: 180 - protein, 156 aa, synthetic construct
  REGION 1..156: note = pYY-BEM4.71; tr|A0A1W5ZQK9|A0A1W5ZQK9_9BACI polypeptide sequence
MNRFMERAVSLAAENVRVGGQPFGAVLVKDDELVAEGVNEMHLNYDVSGHAELLAIRRAQGELQTHDLSGYTMYASGEPCPMCLSAMYFAGIKDVFYCATVEEAAQVGLEKSKNVYDDLQKSKGERSLVMKQMPLEDDQEDPMKLWDERTNHNGTS

SEQ ID NO: 181 - protein, 340 aa, synthetic construct
  REGION 1..340: note = pYY-BEM4.72; tr|A0A378V0W4|A0A378V0W4_MYCFO polypeptide sequence
MVHAQFDPTARQALAATAVEAKTRKDLTWQQIADAAELSPAFVTAAVLGQHALPARSAEAVAALLGLDDDAALLLQTIPIRGSIPGGIPTDPTIYRFYEMLQVYGTTLKALVHEQFGDGIISAINFKLDVRKVADPEGGERAVITLDGKYLPPNPFDRVRYRGGLMDFAQRTIDIARQNVAEGGRPFATVIVKNGEILAESPNLVAQTHDPTAHAEILAIRKACTRIGTEHLIGATIYVLAQPCPMCLGSLYYCSPDEVVFLTTRDAYEPHYVDDRKYFELNMFYDEFAKPWDQRRLPMRYEPRDAAVDVYKLWQERNGGERRVPGAPTSTRPGKNPRGE

SEQ ID NO: 182 - protein, 157 aa, synthetic construct
  REGION 1..157: note = pYY-BEM4.73; tr|I3XF03|I3XF03_RHIFR polypeptide sequence
MKQRCMSPKSAQRFWDNDMHNNKDRPMSENELFVAAREAMAKAHAPYSKFPVGAAIRAEDGQIYTGANIENLSFPEGWCAETTAISHMVMAGQRKIMEVAVIAEKLALCPPCGGCRQRLAEFSGASTRIYLCDETGIKKSLALSDLLPHSFETEILG

SEQ ID NO: 183 - protein, 595 aa, synthetic construct
  REGION 1..595: note = pYY-BEM4.74; tr|F8IEF3|F8IEF3_ALIAT polypeptide sequence
MDAKELETRGWLCMRAVDVIDKKRRGEALAEEELRFLIEGYVAGRIPDYQMSAFLMAVVWRGMTREETLVLTRLLADSGERLDLSGIPGVKVDKHSTGGVGDKATLVVLPLVASIGVPVIKMSGRGLGHTGGTIDKLESIPGFRTDLSVAELVAQVRQVGIALGGQTADLAPADKKLYALRDVTGTVESLPLIASSVMSKKLAGGADAIVLDVKVGDGAFMKSRSDARRLARLMVEIGEAAGRRTVAVLSNMDQPLGCAIGNALEVAEAIRVLSGEGPFDLAEIALALAEEMTVLAGVAATREEARRMLRQSVAEGRALETLRRWIAAQGGDPAVVDDPSRLPQAPVQMPYLPKKAGFVAKLSALAFGLAAMRLGAGRETKEEAIDPSVGIVLHAKVGDRVQTHRPMFTVHARTGEDALRCIQELEAAIQISDDPVEAPPLILARIDRSEALPYADLMDAAREARDRAYVPYSGFAVGAALELADGRMVTGANVENASYGLTNCAERSAVFRAVAEGGPGTKPEIRAVAVIADSPEPVSPCGACRQVLAEFCSPDTPVYLGNLQGDVRETTVGALLPGAFTDAQMANVRRQDKEA

SEQ ID NO: 184 - protein, 153 aa, synthetic construct
  REGION 1..153: note = pYY-BEM4.75; tr|A0A1G3M638|A0A1G3M638_9SPIR polypeptide sequence
MKTTNINALDKWDLRFLQMAEHVAEWSKDPSTKVGAVIVRPDRTIASVGFNGFARGVRDTVERLWNRELKYPLTVHAELNAILSAHEPVRGHSLYVSPLSPCSNCAGVIIQSGIARVVAKCGQVNNPAQWSESFNLALTAFAEAGVSVILVEH

SEQ ID NO: 185 - protein, 177 aa, synthetic construct
  REGION 1..177: note = pYY-BEM4.76; tr|A0A3D9LFR2|A0A3D9LFR2_9MICC polypeptide sequence
MEQNDHGSSGAFSDPFEDDIPLTASLPRITGTGSGIDWQRLESTARAAMTRAYVPYSRFPVGAAALVEDGRVVAGCNIENASLGLTLCAECSLVSNLQMSGGGRIVAFYCVDGNGEVLMPCGRCRQLLYEFHAPGMRLMGPDGELTMDEVLPLAFGPADMTHLSDSAASTDDPGRTR

SEQ ID NO: 186 - protein, 172 aa, synthetic construct
  REGION 1..172: note = pYY-BEM4.77; tr|A0A3B9YGB5|A0A3B9YGB5_9BACT polypeptide sequence
MAKPISKKYRKLIETAKAARKKAYSPYSRYQVGAAVLTESGRIYSGANMENASYGLCMCAERVAIANAVTRGEKVLQAVCVVGKKARPCGACRQVMLEFSTKETELLMVDIDPNARRDTVIRTRVYSMLPNPFDPFESGMLPQHPQNLLRRRKSPQPRRKRRSRPVHREVSR

SEQ ID NO: 187 - protein, 391 aa, synthetic construct
  REGION 1..391: note = pYY-BEM4.78; tr|A0A182F569|A0A182F569_ANOAL polypeptide sequence
MPRPSQFRVSSSQSLSNSQIQASQSSDSVVDITSYVNAVVKALLNLSCTKTIIKRADLVNIALKGNGRLIGRVLQDANIELKEIYGYELIEVEKSKTMILCSTLAAGSMDELNDANRRRYTFLYLILGYIFMKNGSVPETIVWEFLETLGIEEQQEHNYFGDVRKLYDSLFKQAYLTRTKQALEGLNDDVMLISWGVRSKHEVSKKDILAGFCKVMNRDPVDFKAQYIEANEKDDKMNNNINGTVDGRNTVEYSSLDASVKELIEAAIKVRNNAYCPYSNFAVGAALRTVGGDIVTGCNVENGTFGPSVCAERTAVCKAVSEGHREFTAVAVVAFQETEFTAPCGTCRQTLSEFSRKDIPIYLVKPSPVRVMVTSLFQLLPHAFSPSFLNK

SEQ ID NO: 188 - protein, 151 aa, synthetic construct
  REGION 1..151: note = pYY-BEM4.79; tr|A0A264Z0D4|A0A264Z0D4_9BACI polypeptide sequence
MEPKKLIEEAIVASKQAYVQYSNFHVGAALLTKDGKLYHGCNIENASYGLTNCAERTAIFKAVSEGEKEFQAIAVVGDTEGPISPCGACRQVLAEFFSPDTVVILANLKGDHVVTNINELLPGFFSSKDLQKKVKNCFEKNALGSSCLRPI

SEQ ID NO: 189 - protein, 229 aa, synthetic construct
  REGION 1..229: note = pYY-BEM4.80; tr|A0A1L9Q1R3|A0A1L9Q1R3_ASPVE polypeptide sequence
MPLSAEEAALVETATATINSIPLSEDYSVASAAKASDGRVFTGVNVYHFTGGPCAELVVLGVAAAAGAAQLTHIVAVANEQRGILSPCGRCRQVLLDLQPNIQVIVGKEGSEQSVPVAQLLPFSYRQPDQHTPVIFKALTSSGPVVVDFFATWCGPCKAVAPVVGKLSETYTDVRFIQVDVDKARSISQEHDIRAMPTFVLYKDGKLLDKRVVGGNMKELEEQIKAIIA

SEQ ID NO: 190 - protein, 18 aa, synthetic construct
  REGION 1..18: note = synthetic peptide
KRTADGSEFESPKKKRKV

SEQ ID NO: 191 - protein, 16 aa, synthetic construct
  REGION 1..16: note = synthetic peptide
KRPAATKKAGQAKKKK

SEQ ID NO: 192 - protein, 17 aa, synthetic construct
  REGION 1..17: note = synthetic peptide
KKTELQTTNAENKTKKL

SEQ ID NO: 193 - protein, 19 aa, synthetic construct
  REGION 1..19: note = synthetic peptide
KRGINDRNFWRGENGRKTR

SEQ ID NO: 194 - protein, 16 aa, synthetic construct
  REGION 1..16: note = synthetic peptide
RKSGKIAAIVVKRPRK

SEQ ID NO: 195 - protein, 7 aa, synthetic construct
  REGION 1..7: note = synthetic peptide
PKKKRKV

SEQ ID NO: 196 - protein, 30 aa, synthetic construct
  REGION 1..30: note = synthetic polypeptide
MDSLLMNRRKFLYQFKNVRWAKGRRETYLC

SEQ ID NO: 197 - protein, 1368 aa, Streptococcus pyogenes [sequence omitted]

SEQ ID NO: 198 - DNA, 4104 bp, Streptococcus pyogenes
  misc_feature 1..4104: note = wild type spCas9 polynucleotide sequence
  source 1..4104: mol_type = genomic DNA
atggataagaaatactcaataggcttagatatcggcacaaatagcgtcggatgggcggtgatcactgatgattataaggttccgtctaaaaagttcaaggttctgggaaatacagaccgccacagtatcaaaaaaaatcttataggggctcttttatttggcagtggagagacagcggaagcgactcgtctcaaacggacagctcgtagaaggtatacacgtcggaagaatcgtatttgttatctacaggagattttttcaaatgagatggcgaaagtagatgatagtttctttcatcgacttgaagagtcttttttggtggaagaagacaagaagcatgaacgtcatcctatttttggaaatatagtagatgaagttgcttatcatgagaaatatccaactatctatcatctgcgaaaaaaattggcagattctactgataaagcggatttgcgcttaatctatttggccttagcgcatatgattaagtttcgtggtcattttttgattgagggagatttaaatcctgataatagtgatgtggacaaactatttatccagttggtacaaatctacaatcaattatttgaagaaaaccctattaacgcaagtagagtagatgctaaagcgattctttctgcacgattgagtaaatcaagacgattagaaaatctcattgctcagctccccggtgagaagagaaatggcttgtttgggaatctcattgctttgtcattgggattgacccctaattttaaatcaaattttgatttggcagaagatgctaaattacagctttcaaaagatacttacgatgatgatttagataatttattggcgcaaattggagatcaatatgctgatttgtttttggcagctaagaatttatcagatgctattttactttcagatatcctaagagtaaatagtgaaataactaaggctcccctatcagcttcaatgattaagcgctacgatgaacatcatcaagacttgactcttttaaaagctttagttcgacaacaacttccagaaaagtataaagaaatcttttttgatcaatcaaaaaacggatatgcaggttatattgatgggggagctagccaagaagaattttataaatttatcaaaccaattttagaaaaaatggatggtactgaggaattattggtgaaactaaatcgtgaagatttgctgcgcaagcaacggacctttgacaacggctctattccccatcaaattcacttgggtgagctgcatgctattttgagaagacaagaagacttttatccatttttaaaagacaatcgtgagaagattgaaaaaatcttgacttttcgaattccttattatgttggtccattggcgcgtggcaatagtcgttttgcatggatgactcggaagtctgaagaaacaattaccccatggaattttgaagaagttgtcgataaaggtgcttcagctcaatcatttattgaacgcatgacaaactttgataaaaatcttccaaatgaaaaagtactaccaaaacatagtttgctttatgagtattttacggtttataacgaattgacaaaggtcaaatatgttactgagggaatgcgaaaaccagcatttctttcaggtgaacagaagaaagccattgttgatttactcttcaaaacaaatcgaaaagtaaccgttaagcaattaaaagaagattatttcaaaaaaatagaatgttttgatagtgttgaaatttcaggagttgaagatagatttaatgcttcattaggcgcctaccatgatttgctaaaaattattaaagataaagattttttggataatgaagaaaatgaagatatcttagaggatattgttttaacattgaccttatttgaagatagggggatgattgaggaaagacttaaaacatatgctcacctctttgatgataaggtgatgaaacagcttaaacgtcgccgttatactggttggggacgtttgtctcgaaaattgattaatggtattagggataagcaatctggcaaaacaatattagattttttgaaatcagatggttttgccaatcgcaattttatgcagctgatccatgatgatagtttgacatttaaagaagatattcaaaaagcacaggtgtctggacaaggccatagtttacatgaacagattgctaacttagctggcagtcctgctattaaaaaaggtattttacagactgtaaaaattgttgatgaactggtcaaagtaatggggcataagccagaaaatatcgttattgaaatggcacgtgaaaatcagacaactcaaaagggccagaaaaattcgcgagagcgtatgaaacgaatcgaagaaggtatcaaagaattaggaagtcagattcttaaagagcatcctgttgaaaatactcaattgcaaaatgaaaagctctatctctattatctacaaaatggaagagacatgtatgtggaccaagaattagatattaatcgtttaagtgattatgatgtcgatcacattgttccacaaagtttcattaaagacgattcaatagacaataaggtactaacgcgttctgataaaaatcgtggtaaatcggataacgttccaagtgaagaagtagtcaaaaagatgaaaaactattggagacaacttctaaacgccaagttaatcactcaacgtaagtttgataatttaacgaaagctgaacgtggaggtttgagtgaacttgataaagctggttttatcaaacgccaattggttgaaactcgccaaatcactaagcatgtggcacaaattttggatagtcgcatgaatactaaatacgatgaaaatgataaacttattcgagaggttaaagtgattaccttaaaatctaaattagtttctgacttccgaaaagatttccaattctataaagtacgtgagattaacaattaccatcatgcccatgatgcgtatctaaatgccgtcgttggaactgctttgattaagaaatatccaaaacttgaatcggagtttgtctatggtgattataaagtttatgatgttcgtaaaatgattgctaagtctgagcaagaaataggcaaagcaaccgcaaaatatttcttttactctaatatcatgaacttcttcaaaacagaaattacacttgcaaatggagagattcgcaaacgccctctaatcgaaactaatggggaaactggagaaattgtctgggataaagggcgagattttgccacagtgcgcaaagtattgtccatgccccaagtcaatattgtcaagaaaacagaagtacagacaggcggattctccaaggagtcaattttaccaaaaagaaattcggacaagcttattgctcgtaaaaaagactgggatccaaaaaaatatggtggttttgatagtccaacggtagcttattcagtcctagtggttgctaaggtggaaaaagggaaatcgaagaagttaaaatccgttaaagagttactagggatcacaattatggaaagaagttcctttgaaaaaaatccgattgactttttagaagctaaaggatataaggaagttaaaaaagacttaatcattaaactacctaaatatagtctttttgagttagaaaacggtcgtaaacggatgctggctagtgccggagaattacaaaaaggaaatgagctggctctgccaagcaaatatgtgaattttttatatttagctagtcattatgaaaagttgaagggtagtccagaagataacgaacaaaaacaattgtttgtggagcagcataagcattatttagatgagattattgagcaaatcagtgaattttctaagcgtgttattttagcagatgccaatttagataaagttcttagtgcatataacaaacatagagacaaaccaatacgtgaacaagcagaaaatattattcatttatttacgttgacgaatcttggagctcccgctgcttttaaatattttgatacaacaattgatcgtaaacgatatacgtctacaaaagaagttttagatgccactcttatccatcaatccatcactggtctttatgaaacacgcattgatttgagtcagctaggaggtgactga

SEQ ID NO: 199 - protein, 1367 aa, Streptococcus pyogenes
  REGION 1..1367: note = MISC_FEATURE - spCas9 polypeptide sequence
MDKKYSIGLDIGTNSVGWAVITDDYKVPSKKFKVLGNTDRHSIKKNLIGALLFGSGETAEATRLKRTARRRYTRRKNRICYLQEIFSNEMAKVDDSFFHRLEESFLVEEDKKHERHPIFGNIVDEVAYHEKYPTIYHLRKKLADSTDKADLRLIYLALAHMIKFRGHFLIEGDLNPDNSDVDKLFIQLVQIYNQLFEENPINASRVDAKAILSARLSKSRRLENLIAQLPGEKRNGLFGNLIALSLGLTPNFKSNFDLAEDAKLQLSKDTYDDDLDNLLAQIGDQYADLFLAAKNLSDAILLSDILRVNSEITKAPLSASMIKRYDEHHQDLTLLKALVRQQLPEKYKEIFFDQSKNGYAGYIDGGASQEEFYKFIKPILEKMDGTEELLVKLNREDLLRKQRTFDNGSIPHQIHLGELHAILRRQEDFYPFLKDNREKIEKILTFRIPYYVGPLARGNSRFAWMTRKSEETITPWNFEEVVDKGASAQSFIERMTNFDKNLPNEKVLPKHSLLYEYFTVYNELTKVKYVTEGMRKPAFLSGEQKKAIVDLLFKTNRKVTVKQLKEDYFKKIECFDSVEISGVEDRFNASLGAYHDLLKIIKDKDFLDNEENEDILEDIVLTLTLFEDRGMIEERLKTYAHLFDDKVMKQLKRRRYTGWGRLSRKLINGIRDKQSGKTILDFLKSDGFANRNFMQLIHDDSLTFKEDIQKAQVSGQGHSLHEQIANLAGSPAIKKGILQTVKIVDELVKVMGHKPENIVIEMARENQTTQKGQKNSRERMKRIEEGIKELGSQILKEHPVENTQLQNEKLYLYYLQNGRDMYVDQELDINRLSDYDVDHIVPQSFIKDDSIDNKVLTRSDKNRGKSDNVPSEEVVKKMKNYWRQLLNAKLITQRKFDNLTKAERGGLSELDKAGFIKRQLVETRQITKHVAQILDSRMNTKYDENDKLIREVKVITLKSKLVSDFRKDFQFYKVREINNYHHAHDAYLNAVVGTALIKKYPKLESEFVYGDYKVYDVRKMIAKSEQEIGKATAKYFFYSNIMNFFKTEITLANGEIRKRPLIETNGETGEIVWDKGRDFATVRKVLSMPQVNIVKKTEVQTGGFSKESILPKRNSDKLIARKKDWDPKKYGGFDSPTVAYSVLVVAKVEKGKSKKLKSVKELLGITIMERSSFEKNPIDFLEAKGYKEVKKDLIIKLPKYSLFELENGRKRMLASAGELQKGNELALPSKYVNFLYLASHYEKLKGSPEDNEQKQLFVEQHKHYLDEIIEQISEFSKRVILADANLDKVLSAYNKHRDKPIREQAENIIHLFTLTNLGAPAAFKYFDTTIDRKRYTSTKEVLDATLIHQSITGLYETRIDLSQLGGD

SEQ ID NO: 200 - DNA, 4212 bp, synthetic construct
  misc_feature 1..4212: note = wild-type Cas9 polynucleotide sequence
  misc_feature 5..58: note = RuvC domain
  misc_feature 718..764: note = RuvC domain
  misc_feature 772..901: note = HNH domain
  misc_feature 906..1101: note = RuvC domain
  source 1..4212: mol_type = other DNA
atggataaaaagtattctattggtttagacatcggcactaattccgttggatgggctgtcataaccgatgaatacaaagtaccttcaaagaaatttaaggtgttggggaacacagaccgtcattcgattaaaaagaatcttatcggtgccctcctattcgatagtggcgaaacggcagaggcgactcgcctgaaacgaaccgctcggagaaggtatacacgtcgcaagaaccgaatatgttacttacaagaaatttttagcaatgagatggccaaagttgacgattctttctttcaccgtttggaagagtccttccttgtcgaagaggacaagaaacatgaacggcaccccatctttggaaacatagtagatgaggtggcatatcatgaaaagtacccaacgatttatcacctcagaaaaaagctagttgactcaactgataaagcggacctgaggttaatctacttggctcttgcccatatgataaagttccgtgggcactttctcattgagggtgatctaaatccggacaactcggatgtcgacaaactgttcatccagttagtacaaacctataatcagttgtttgaagagaaccctataaatgcaagtggcgtggatgcgaaggctattcttagcgcccgcctctctaaatcccgacggctagaaaacctgatcgcacaattacccggagagaagaaaaatgggttgttcggtaaccttatagcgctctcactaggcctgacaccaaattttaagtcgaacttcgacttagctgaagatgccaaattgcagcttagtaaggacacgtacgatgacgatctcgacaatctactggcacaaattggagatcagtatgcggacttatttttggctgccaaaaaccttagcgatgcaatcctcctatctgacatactgagagttaatactgagattaccaaggcgccgttatccgcttcaatgatcaaaaggtacgatgaacatcaccaagacttgacacttctcaaggccctagtccgtcagcaactgcctgagaaatataaggaaatattctttgatcagtcgaaaaacgggtacgcaggttatattgacggcggagcgagtcaagaggaattctacaagtttatcaaacccatattagagaagatggatgggacggaagagttgcttgtaaaactcaatcgcgaagatctactgcgaaagcagcggactttcgacaacggtagcattccacatcaaatccacttaggcgaattgcatgctatacttagaaggcaggaggatttttatccgttcctcaaagacaatcgtgaaaagattgagaaaatcctaacctttcgcataccttactatgtgggacccctggcccgagggaactctcggttcgcatggatgacaagaaagtccgaagaaacgattactccatggaattttgaggaagttgtcgataaaggtgcgtcagctcaatcgttcatcgagaggatgaccaactttgacaagaatttaccgaacgaaaaagtattgcctaagcacagtttactttacgagtatttcacagtgtacaatgaactcacgaaagttaagtatgtcactgagggcatgcgtaaacccgcctttctaagcggagaacagaagaaagcaatagtagatctgttattcaagaccaaccgcaaagtgacagttaagcaattgaaagaggactactttaagaaaattgaatgcttcgattctgtcgagatctccggggtagaagatcgatttaatgcgtcacttggtacgtatcatgacctcctaaagataattaaagataaggacttcctggataacgaagagaatgaagatatcttagaagatatagtgttgactcttaccctctttgaagatcgggaaatgattgaggaaagactaaaaacatacgctcacctgttcgacgataaggttatgaaacagttaaagaggcgtcgctatacgggctggggacgattgtcgcggaaacttatcaacgggataagagacaagcaaagtggtaaaactattctcgattttctaaagagcgacggcttcgccaataggaactttatgcagctgatccatgatgactctttaaccttcaaagaggatatacaaaaggcacaggtttccggacaaggggactcattgcacgaacatattgcgaatcttgctggttcgccagccatcaaaaagggcatactccagacagtcaaagtagtggatgagctagttaaggtcatgggacgtcacaaaccggaaaacattgtaatcgagatggcacgcgaaaatcaaacgactcagaaggggcaaaaaaacagtcgagagcggatgaagagaatagaagagggtattaaagaactgggcagccagatcttaaaggagcatcctgtggaaaatacccaattgcagaacgagaaactttacctctattacctacaaaatggaagggacatgtatgttgatcaggaactggacataaaccgtttatctgattacgacgtcgatcacattgtaccccaatcctttttgaaggacgattcaatcgacaataaagtgcttacacgctcggataagaaccgagggaaaagtgacaatgttccaagcgaggaagtcgtaaagaaaatgaagaactattggcggcagctcctaaatgcgaaactgataacgcaaagaaagttcgataacttaactaaagctgagaggggtggcttgtctgaacttgacaaggccggatttattaaacgtcagctcgtggaaacccgccaaatcacaaagcatgttgcacagatactagattcccgaatgaatacgaaatacgacgagaacgataagctgattcgggaagtcaaagtaatcactttaaagtcaaaattggtgtcggacttcagaaaggattttcaattctataaagttagggagataaataactaccaccatgcgcacgacgcttatcttaatgccgtcgtagggaccgcactcattaagaaatacccgaagctagaaagtgagtttgtgtatggtgattacaaagtttatgacgtccgtaagatgatcgcgaaaagcgaacaggagataggcaaggctacagccaaatacttcttttattctaacattatgaatttctttaagacggaaatcactctggcaaacggagagatacgcaaacgacctttaattgaaaccaatggggagacaggtgaaatcgtatgggataagggccgggacttcgcgacggtgagaaaagttttgtccatgccccaagtcaacatagtaaagaaaactgaggtgcagaccggagggttttcaaaggaatcgattcttccaaaaaggaatagtgataagctcatcgctcgtaaaaaggactgggacccgaaaaagtacggtggcttcgatagccctacagttgcctattctgtcctagtagtggcaaaagttgagaagggaaaatccaagaaactgaagtcagtcaaagaattattggggataacgattatggagcgctcgtcttttgaaaagaaccccatcgacttccttgaggcgaaaggttacaaggaagtaaaaaaggatctcataattaaactaccaaagtatagtctgtttgagttagaaaatggccgaaaacggatgttggctagcgccggagagcttcaaaaggggaacgaactcgcactaccgtctaaatacgtgaatttcctgtatttagcgtcccattacgagaagttgaaaggttcacctgaagataacgaacagaagcaactttttgttgagcagcacaaacattatctcgacgaaatcatagagcaaatttcggaattcagtaagagagtcatcctagctgatgccaatctggacaaagtattaagcgcatacaacaagcacagggataaacccatacgtgagcaggcggaaaatattatccatttgtttactcttaccaacctcggcgctccagccgcattcaagtattttgacacaacgatagatcgcaaacgatacacttctaccaaggaggtgctagacgcgacactgattcaccaatccatcacgggattatatgaaactcggatagatttgtcacagcttgggggtgacggatcccccaagaagaagaggaaagtctcgagcgactacaaagaccatgacggtgattataaagatcatgacatcgattacaaggatgacgatgacaaggctgcagga

SEQ ID NO: 201 - protein, 1368 aa, synthetic construct
  REGION 1..1368: note = exemplary catalytically active Cas9 nickase (nCas9) polypeptide sequence
MDKKYSIGLAIGTNSVGWAVITDEYKVPSKKFKVLGNTDRHSIKKNLIGALLFDSGETAEATRLKRTARRRYTRRKNRICYLQEIFSNEMAKVDDSFFHRLEESFLVEEDKKHERHPIFGNIVDEVAYHEKYPTIYHLRKKLVDSTDKADLRLIYLALAHMIKFRGHFLIEGDLNPDNSDVDKLFIQLVQTYNQLFEENPINASGVDAKAILSARLSKSRRLENLIAQLPGEKKNGLFGNLIALSLGLTPNFKSNFDLAEDAKLQLSKDTYDDDLDNLLAQIGDQYADLFLAAKNLSDAILLSDILRVNTEITKAPLSASMIKRYDEHHQDLTLLKALVRQQLPEKYKEIFFDQSKNGYAGYIDGGASQEEFYKFIKPILEKMDGTEELLVKLNREDLLRKQRTFDNGSIPHQIHLGELHAILRRQEDFYPFLKDNREKIEKILTFRIPYYVGPLARGNSRFAWMTRKSEETITPWNFEEVVDKGASAQSFIERMTNFDKNLPNEKVLPKHSLLYEYFTVYNELTKVKYVTEGMRKPAFLSGEQKKAIVDLLFKTNRKVTVKQLKEDYFKKIECFDSVEISGVEDRFNASLGTYHDLLKIIKDKDFLDNEENEDILEDIVLTLTLFEDREMIEERLKTYAHLFDDKVMKQLKRRRYTGWGRLSRKLINGIRDKQSGKTILDFLKSDGFANRNFMQLIHDDSLTFKEDIQKAQVSGQGDSLHEHIANLAGSPAIKKGILQTVKVVDELVKVMGRHKPENIVIEMARENQTTQKGQKNSRERMKRIEEGIKELGSQILKEHPVENTQLQNEKLYLYYLQNGRDMYVDQELDINRLSDYDVDHIVPQSFLKDDSIDNKVLTRSDKNRGKSDNVPSEEVVKKMKNYWRQLLNAKLITQRKFDNLTKAERGGLSELDKAGFIKRQLVETRQITKHVAQILDSRMNTKYDENDKLIREVKVITLKSKLVSDFRKDFQFYKVREINNYHHAHDAYLNAVVGTALIKKYPKLESEFVYGDYKVYDVRKMIAKSEQEIGKATAKYFFYSNIMNFFKTEITLANGEIRKRPLIETNGETGEIVWDKGRDFATVRKVLSMPQVNIVKKTEVQTGGFSKESILPKRNSDKLIARKKDWDPKKYGGFDSPTVAYSVLVVAKVEKGKSKKLKSVKELLGITIMERSSFEKNPIDFLEAKGYKEVKKDLIIKLPKYSLFELENGRKRMLASAGELQKGNELALPSKYVNFLYLASHYEKLKGSPEDNEQKQLFVEQHKHYLDEIIEQISEFSKRVILADANLDKVLSAYNKHRDKPIREQAENIIHLFTLTNLGAPAAFKYFDTTIDRKRYTSTKEVLDATLIHQSITGLYETRIDLSQLGGD

SEQ ID NO: 202 - DNA, 4107 bp, Streptococcus pyogenes
  misc_feature 1..4107: note = Cas9 from Streptococcus pyogenes (NCBI Ref. Seq.: NC_002737.2)polynucleotide sequence
  source 1..4107: mol_type = genomic DNA
atggataagaaatactcaataggcttagatatcggcacaaatagcgtcggatgggcggtgatcactgatgaatataaggttccgtctaaaaagttcaaggttctgggaaatacagaccgccacagtatcaaaaaaaatcttataggggctcttttatttgacagtggagagacagcggaagcgactcgtctcaaacggacagctcgtagaaggtatacacgtcggaagaatcgtatttgttatctacaggagattttttcaaatgagatggcgaaagtagatgatagtttctttcatcgacttgaagagtcttttttggtggaagaagacaagaagcatgaacgtcatcctatttttggaaatatagtagatgaagttgcttatcatgagaaatatccaactatctatcatctgcgaaaaaaattggtagattctactgataaagcggatttgcgcttaatctatttggccttagcgcatatgattaagtttcgtggtcattttttgattgagggagatttaaatcctgataatagtgatgtggacaaactatttatccagttggtacaaacctacaatcaattatttgaagaaaaccctattaacgcaagtggagtagatgctaaagcgattctttctgcacgattgagtaaatcaagacgattagaaaatctcattgctcagctccccggtgagaagaaaaatggcttatttgggaatctcattgctttgtcattgggtttgacccctaattttaaatcaaattttgatttggcagaagatgctaaattacagctttcaaaagatacttacgatgatgatttagataatttattggcgcaaattggagatcaatatgctgatttgtttttggcagctaagaatttatcagatgctattttactttcagatatcctaagagtaaatactgaaataactaaggctcccctatcagcttcaatgattaaacgctacgatgaacatcatcaagacttgactcttttaaaagctttagttcgacaacaacttccagaaaagtataaagaaatcttttttgatcaatcaaaaaacggatatgcaggttatattgatgggggagctagccaagaagaattttataaatttatcaaaccaattttagaaaaaatggatggtactgaggaattattggtgaaactaaatcgtgaagatttgctgcgcaagcaacggacctttgacaacggctctattccccatcaaattcacttgggtgagctgcatgctattttgagaagacaagaagacttttatccatttttaaaagacaatcgtgagaagattgaaaaaatcttgacttttcgaattccttattatgttggtccattggcgcgtggcaatagtcgttttgcatggatgactcggaagtctgaagaaacaattaccccatggaattttgaagaagttgtcgataaaggtgcttcagctcaatcatttattgaacgcatgacaaactttgataaaaatcttccaaatgaaaaagtactaccaaaacatagtttgctttatgagtattttacggtttataacgaattgacaaaggtcaaatatgttactgaaggaatgcgaaaaccagcatttctttcaggtgaacagaagaaagccattgttgatttactcttcaaaacaaatcgaaaagtaaccgttaagcaattaaaagaagattatttcaaaaaaatagaatgttttgatagtgttgaaatttcaggagttgaagatagatttaatgcttcattaggtacctaccatgatttgctaaaaattattaaagataaagattttttggataatgaagaaaatgaagatatcttagaggatattgttttaacattgaccttatttgaagatagggagatgattgaggaaagacttaaaacatatgctcacctctttgatgataaggtgatgaaacagcttaaacgtcgccgttatactggttggggacgtttgtctcgaaaattgattaatggtattagggataagcaatctggcaaaacaatattagattttttgaaatcagatggttttgccaatcgcaattttatgcagctgatccatgatgatagtttgacatttaaagaagacattcaaaaagcacaagtgtctggacaaggcgatagtttacatgaacatattgcaaatttagctggtagccctgctattaaaaaaggtattttacagactgtaaaagttgttgatgaattggtcaaagtaatggggcggcataagccagaaaatatcgttattgaaatggcacgtgaaaatcagacaactcaaaagggccagaaaaattcgcgagagcgtatgaaacgaatcgaagaaggtatcaaagaattaggaagtcagattcttaaagagcatcctgttgaaaatactcaattgcaaaatgaaaagctctatctctattatctccaaaatggaagagacatgtatgtggaccaagaattagatattaatcgtttaagtgattatgatgtcgatcacattgttccacaaagtttccttaaagacgattcaatagacaataaggtcttaacgcgttctgataaaaatcgtggtaaatcggataacgttccaagtgaagaagtagtcaaaaagatgaaaaactattggagacaacttctaaacgccaagttaatcactcaacgtaagtttgataatttaacgaaagctgaacgtggaggtttgagtgaacttgataaagctggttttatcaaacgccaattggttgaaactcgccaaatcactaagcatgtggcacaaattttggatagtcgcatgaatactaaatacgatgaaaatgataaacttattcgagaggttaaagtgattaccttaaaatctaaattagtttctgacttccgaaaagatttccaattctataaagtacgtgagattaacaattaccatcatgcccatgatgcgtatctaaatgccgtcgttggaactgctttgattaagaaatatccaaaacttgaatcggagtttgtctatggtgattataaagtttatgatgttcgtaaaatgattgctaagtctgagcaagaaataggcaaagcaaccgcaaaatatttcttttactctaatatcatgaacttcttcaaaacagaaattacacttgcaaatggagagattcgcaaacgccctctaatcgaaactaatggggaaactggagaaattgtctgggataaagggcgagattttgccacagtgcgcaaagtattgtccatgccccaagtcaatattgtcaagaaaacagaagtacagacaggcggattctccaaggagtcaattttaccaaaaagaaattcggacaagcttattgctcgtaaaaaagactgggatccaaaaaaatatggtggttttgatagtccaacggtagcttattcagtcctagtggttgctaaggtggaaaaagggaaatcgaagaagttaaaatccgttaaagagttactagggatcacaattatggaaagaagttcctttgaaaaaaatccgattgactttttagaagctaaaggatataaggaagttaaaaaagacttaatcattaaactacctaaatatagtctttttgagttagaaaacggtcgtaaacggatgctggctagtgccggagaattacaaaaaggaaatgagctggctctgccaagcaaatatgtgaattttttatatttagctagtcattatgaaaagttgaagggtagtccagaagataacgaacaaaaacaattgtttgtggagcagcataagcattatttagatgagattattgagcaaatcagtgaattttctaagcgtgttattttagcagatgccaatttagataaagttcttagtgcatataacaaacatagagacaaaccaatacgtgaacaagcagaaaatattattcatttatttacgttgacgaatcttggagctcccgctgcttttaaatattttgatacaacaattgatcgtaaacgatatacgtctacaaaagaagttttagatgccactcttatccatcaatccatcactggtctttatgaaacacgcattgatttgagtcagctaggaggtgactga

SEQ ID NO: 203 - protein, 1368 aa, synthetic construct
  REGION 1..1368: note = catalytically inactive Cas9 (dCas9)polypeptide sequence
  REGION 5..58: note = MISC_FEATURE - RuvC domain
  REGION 718..764: note = MISC_FEATURE - RuvC domain
  REGION 773..902: note = MISC_FEATURE - HNH domain
  REGION 907..1102: note = MISC_FEATURE - RuvC domain
MDKKYSIGLAIGTNSVGWAVITDEYKVPSKKFKVLGNTDRHSIKKNLIGALLFDSGETAEATRLKRTARRRYTRRKNRICYLQEIFSNEMAKVDDSFFHRLEESFLVEEDKKHERHPIFGNIVDEVAYHEKYPTIYHLRKKLVDSTDKADLRLIYLALAHMIKFRGHFLIEGDLNPDNSDVDKLFIQLVQTYNQLFEENPINASGVDAKAILSARLSKSRRLENLIAQLPGEKKNGLFGNLIALSLGLTPNFKSNFDLAEDAKLQLSKDTYDDDLDNLLAQIGDQYADLFLAAKNLSDAILLSDILRVNTEITKAPLSASMIKRYDEHHQDLTLLKALVRQQLPEKYKEIFFDQSKNGYAGYIDGGASQEEFYKFIKPILEKMDGTEELLVKLNREDLLRKQRTFDNGSIPHQIHLGELHAILRRQEDFYPFLKDNREKIEKILTFRIPYYVGPLARGNSRFAWMTRKSEETITPWNFEEVVDKGASAQSFIERMTNFDKNLPNEKVLPKHSLLYEYFTVYNELTKVKYVTEGMRKPAFLSGEQKKAIVDLLFKTNRKVTVKQLKEDYFKKIECFDSVEISGVEDRFNASLGTYHDLLKIIKDKDFLDNEENEDILEDIVLTLTLFEDREMIEERLKTYAHLFDDKVMKQLKRRRYTGWGRLSRKLINGIRDKQSGKTILDFLKSDGFANRNFMQLIHDDSLTFKEDIQKAQVSGQGDSLHEHIANLAGSPAIKKGILQTVKVVDELVKVMGRHKPENIVIEMARENQTTQKGQKNSRERMKRIEEGIKELGSQILKEHPVENTQLQNEKLYLYYLQNGRDMYVDQELDINRLSDYDVDAIVPQSFLKDDSIDNKVLTRSDKNRGKSDNVPSEEVVKKMKNYWRQLLNAKLITQRKFDNLTKAERGGLSELDKAGFIKRQLVETRQITKHVAQILDSRMNTKYDENDKLIREVKVITLKSKLVSDFRKDFQFYKVREINNYHHAHDAYLNAVVGTALIKKYPKLESEFVYGDYKVYDVRKMIAKSEQEIGKATAKYFFYSNIMNFFKTEITLANGEIRKRPLIETNGETGEIVWDKGRDFATVRKVLSMPQVNIVKKTEVQTGGFSKESILPKRNSDKLIARKKDWDPKKYGGFDSPTVAYSVLVVAKVEKGKSKKLKSVKELLGITIMERSSFEKNPIDFLEAKGYKEVKKDLIIKLPKYSLFELENGRKRMLASAGELQKGNELALPSKYVNFLYLASHYEKLKGSPEDNEQKQLFVEQHKHYLDEIIEQISEFSKRVILADANLDKVLSAYNKHRDKPIREQAENIIHLFTLTNLGAPAAFKYFDTTIDRKRYTSTKEVLDATLIHQSITGLYETRIDLSQLGGD

SEQ ID NO: 204 - protein, 345 aa, Sulfolobus islandicus
  REGION 1..345: note = MISC_FEATURE - tr|F0NN87|F0NN87_SULIHCRISPR-associatedCasx protein OS =Sulfolobus islandicus (strain HVE10/4) GN = SiH_0402 PE=4; SV = 1);CasX polypeptide sequence
MEVPLYNIFGDNYIIQVATEAENSTIYNNKVEIDDEELRNVLNLAYKIAKNNEDAAAERRGKAKKKKGEEGETTTSNIILPLSGNDKNPWTETLKCYNFPTTVALSEVFKNFSQVKECEEVSAPSFVKPEFYEFGRSPGMVERTRRVKLEVEPHYLIIAAAGWVLTRLGKAKVSEGDYVGVNVFTPTRGILYSLIQNVNGIVPGIKPETAFGLWIARKVVSSVTNPNVSVVRIYTISDAVGQNPTTINGGFSIDLTKLLEKRYLLSERLEAIARNALSISSNMRERYIVLANYIYEYLTGSKRLEDLLYFANRDLIMNLNSDDGKVRDLKLISAYVNGELIRGEG

SEQ ID NO: 205 - protein, 345 aa, Sulfolobus islandicus
  REGION 1..345: note = MISC_FEATURE - tr|F0NH53|F0NH53_SULIR CRISPR associated protein, Casx OS =Sulfolobus islandicus (strain REY15A) GN=SiRe_0771 PE=4 SV=1);CasX polypeptide sequence
MEVPLYNIFGDNYIIQVATEAENSTIYNNKVEIDDEELRNVLNLAYKIAKNNEDAAAERRGKAKKKKGEEGETTTSNIILPLSGNDKNPWTETLKCYNFPTTVALSEVFKNFSQVKECEEVSAPSFVKPEFYKFGRSPGMVERTRRVKLEVEPHYLIMAAAGWVLTRLGKAKVSEGDYVGVNVFTPTRGILYSLIQNVNGIVPGIKPETAFGLWIARKVVSSVTNPNVSVVSIYTISDAVGQNPTTINGGFSIDLTKLLEKRDLLSERLEAIARNALSISSNMRERYIVLANYIYEYLTGSKRLEDLLYFANRDLIMNLNSDDGKVRDLKLISAYVNGELIRGEG

SEQ ID NO: 206 - protein, 987 aa, unidentified
  REGION 1..987: note = MISC_FEATURE - CasX polypeptide sequence
MEKRINKIRKKLSADNATKPVSRSGPMKTLLVRVMTDDLKKRLEKRRKKPEVMPQVISNNAANNLRMLLDDYTKMKEAILQVYWQEFKDDHVGLMCKFAQPASKKIDQNKLKPEMDEKGNLTTAGFACSQCGQPLFVYKLEQVSEKGKAYTNYFGRCNVAEHEKLILLAQLKPVKDSDEAVTYSLGKFGQRALDFYSIHVTKESTHPVKPLAQIAGNRYASGPVGKALSDACMGTIASFLSKYQDIIIEHQKVVKGNQKRLESLRELAGKENLEYPSVTLPPQPHTKEGVDFAYNEVIARVRMWVNLNLWQKLKLSRDDAKPLLRLKGFPSFPVVERRENEVDWWNTINEVKKLIDAKRDMGRVFWSGVTAEKRNTILEGYNYLPNENDHKKREGSLENPKKPAKRQFGDLLLYLEKKYAGDWGKVFDEAWERIDKKIAGLTSHIEREEARNAEDAQSKAVLTDWLRAKASFVLERLKEMDEKEFYACEIQLQKWYGDLRGNPFAVEAENRVVDISGFSIGSDGHSIQYRNLLAWKYLENGKREFYLLMNYGKKGRIRFTDGTDIKKSGKWQGLLYGGGKAKVIDLTFDPDDEQLIILPLAFGTRQGREFIWNDLLSLETGLIKLANGRVIEKTIYNKKIGRDEPALFVALTFERREVVDPSNIKPVNLIGVARGENIPAVIALTDPEGCPLPEFKDSSGGPTDILRIGEGYKEKQRAIQAAKEVEQRRAGGYSRKFASKSRNLADDMVRNSARDLFYHAVTHDAVLVFANLSRGFGRQGKRTFMTERQYTKMEDWLTAKLAYEGLTSKTYLSKTLAQYTSKTCSNCGFTITYADMDVMLVRLKKTSDGWATTLNNKELKAEYQITYYNRYKRQTVEKELSAELDRLSEESGNNDISKWTKGRRDEALFLLKKRFSHRPVQEQFVCLDCGHEVHAAEQAALNIARSWLFLNSNSTEFKSYKSGKQPFVGAWQAFYKRRLKEVWKPNA

SEQ ID NO: 207 - protein, 1210 aa, unidentified
  REGION 1..1210: note = MISC_FEATURE - APG80656.1 CRISPR-associated protein CasY [uncultured Parcubacteria group bacterium]; CasY polypeptide sequence
MSKRHPRISGVKGYRLHAQRLEYTGKSGAMRTIKYPLYSSPSGGRTVPREIVSAINDDYVGLYGLSNFDDLYNAEKRNEEKVYSVLDFWYDCVQYGAVFSYTAPGLLKNVAEVRGGSYELTKTLKGSHLYDELQIDKVIKFLNKKEISRANGSLDKLKKDIIDCFKAEYRERHKDQCNKLADDIKNAKKDAGASLGERQKKLFRDFFGISEQSENDKPSFTNPLNLTCCLLPFDTVNNNRNRGEVLFNKLKEYAQKLDKNEGSLEMWEYIGIGNSGTAFSNFLGEGFLGRLRENKITELKKAMMDITDAWRGQEQEEELEKRLRILAALTIKLREPKFDNHWGGYRSDINGKLSSWLQNYINQTVKIKEDLKGHKKDLKKAKEMINRFGESDTKEEAVVSSLLESIEKIVPDDSADDEKPDIPAIAIYRRFLSDGRLTLNRFVQREDVQEALIKERLEAEKKKKPKKRKKKSDAEDEKETIDFKELFPHLAKPLKLVPNFYGDSKRELYKKYKNAAIYTDALWKAVEKIYKSAFSSSLKNSFFDTDFDKDFFIKRLQKIFSVYRRFNTDKWKPIVKNSFAPYCDIVSLAENEVLYKPKQSRSRKSAAIDKNRVRLPSTENIAKAGIALARELSVAGFDWKDLLKKEEHEEYIDLIELHKTALALLLAVTETQLDISALDFVENGTVKDFMKTRDGNLVLEGRFLEMFSQSIVFSELRGLAGLMSRKEFITRSAIQTMNGKQAELLYIPHEFQSAKITTPKEMSRAFLDLAPAEFATSLEPESLSEKSLLKLKQMRYYPHYFGYELTRTGQGIDGGVAENALRLEKSPVKKREIKCKQYKTLGRGQNKIVLYVRSSYYQTQFLEWFLHRPKNVQTDVAVSGSFLIDEKKVKTRWNYDALTVALEPVSGSERVFVSQPFTIFPEKSAEEEGQRYLGIDIGEYGIAYTALEITGDSAKILDQNFISDPQLKTLREEVKGLKLDQRRGTFAMPSTKIARIRESLVHSLRNRIHHLALKHKAKIVYELEVSRFEEGKQKIKKVYATLKKADVYSEIDADKNLQTTVWGKLAVASEISASYTSQFCGACKKLWRAEMQVDETITTQELIGTVRVIKGGTLIDAIKDFMRPPIFDENDTPFPKYRDFCDKHHISKKMRGNSCLFICPFCRANADADIQASQTIALLRYVKEEKKVEDYFERFRKLKNIKVLGQMKKI

SEQ ID NO: 208 - protein, 1082 aa, Neisseria meningitidis
  REGION 1..1082: note = MISC_FEATURE - NCBI Reference: WP_002235162.1; type II CRISPR RNA-guided endonuclease Cas9; Nme1Cas9 polypeptide sequence
MAAFKPNPINYILGLDIGIASVGWAMVEIDEDENPICLIDLGVRVFERAEVPKTGDSLAMARRLARSVRRLTRRRAHRLLRARRLLKREGVLQAADFDENGLIKSLPNTPWQLRAAALDRKLTPLEWSAVLLHLIKHRGYLSQRKNEGETADKELGALLKGVADNAHALQTGDFRTPAELALNKFEKESGHIRNQRGDYSHTFSRKDLQAELILLFEKQKEFGNPHVSGGLKEGIETLLMTQRPALSGDAVQKMLGHCTFEPAEPKAAKNTYTAERFIWLTKLNNLRILEQGSERPLTDTERATLMDEPYRKSKLTYAQARKLLGLEDTAFFKGLRYGKDNAEASTLMEMKAYHAISRALEKEGLKDKKSPLNLSPELQDEIGTAFSLFKTDEDITGRLKDRIQPEILEALLKHISFDKFVQISLKALRRIVPLMEQGKRYDEACAEIYGDHYGKKNTEEKIYLPPIPADEIRNPVVLRALSQARKVINGVVRRYGSPARIHIETAREVGKSFKDRKEIEKRQEENRKDREKAAAKFREYFPNFVGEPKSKDILKLRLYEQQHGKCLYSGKEINLGRLNEKGYVEIDHALPFSRTWDDSFNNKVLVLGSENQNKGNQTPYEYFNGKDNSREWQEFKARVETSRFPRSKKQRILLQKFDEDGFKERNLNDTRYVNRFLCQFVADRMRLTGKGKKRVFASNGQITNLLRGFWGLRKVRAENDRHHALDAVVVACSTVAMQQKITRFVRYKEMNAFDGKTIDKETGEVLHQKTHFPQPWEFFAQEVMIRVFGKPDGKPEFEEADTPEKLRTLLAEKLSSRPEAVHEYVTPLFVSRAPNRKMSGQGHMETVKSAKRLDEGVSVLRVPLTQLKLKDLEKMVNREREPKLYEALKARLEAHKDDPAKAFAEPFYKYDKAGNRTQQVKAVRVEQVQKTGVWVRNHNGIADNATMVRVDVFEKGDKYYLVPIYSWQVAKGILPDRAVVQGKDEEDWQLIDDSFNFKFSLHPNDLVEVITKKARMFGYFASCHRGTGNINIRIHDLDHKIGKNGILEGIGVKTALSFQKYQIDELGKEIRPCRLKKRPPVR

SEQ ID NO: 209 - protein, 1082 aa, Neisseria meningitidis
  REGION 1..1082: note = MISC_FEATURE - NCBI Reference: WP_002230835; type II CRISPR RNA-guided endonuclease Cas9; Nme2Cas9 polypeptide sequence
MAAFKPNPINYILGLDIGIASVGWAMVEIDEEENPIRLIDLGVRVFERAEVPKTGDSLAMARRLARSVRRLTRRRAHRLLRARRLLKREGVLQAADFDENGLIKSLPNTPWQLRAAALDRKLTPLEWSAVLLHLIKHRGYLSQRKNEGETADKELGALLKGVANNAHALQTGDFRTPAELALNKFEKESGHIRNQRGDYSHTFSRKDLQAELILLFEKQKEFGNPHVSGGLKEGIETLLMTQRPALSGDAVQKMLGHCTFEPAEPKAAKNTYTAERFIWLTKLNNLRILEQGSERPLTDTERATLMDEPYRKSKLTYAQARKLLGLEDTAFFKGLRYGKDNAEASTLMEMKAYHAISRALEKEGLKDKKSPLNLSSELQDEIGTAFSLFKTDEDITGRLKDRVQPEILEALLKHISFDKFVQISLKALRRIVPLMEQGKRYDEACAEIYGDHYGKKNTEEKIYLPPIPADEIRNPVVLRALSQARKVINGVVRRYGSPARIHIETAREVGKSFKDRKEIEKRQEENRKDREKAAAKFREYFPNFVGEPKSKDILKLRLYEQQHGKCLYSGKEINLVRLNEKGYVEIDHALPFSRTWDDSFNNKVLVLGSENQNKGNQTPYEYFNGKDNSREWQEFKARVETSRFPRSKKQRILLQKFDEDGFKECNLNDTRYVNRFLCQFVADHILLTGKGKRRVFASNGQITNLLRGFWGLRKVRAENDRHHALDAVVVACSTVAMQQKITRFVRYKEMNAFDGKTIDKETGKVLHQKTHFPQPWEFFAQEVMIRVFGKPDGKPEFEEADTPEKLRTLLAEKLSSRPEAVHEYVTPLFVSRAPNRKMSGAHKDTLRSAKRFVKHNEKISVKRVWLTEIKLADLENMVNYKNGREIELYEALKARLEAYGGNAKQAFDPKDNPFYKKGGQLVKAVRVEKTQESGVLLNKKNAYTIADNGDMVRVDVFCKVDKKGKNQYFIVPIYAWQVAENILPDIDCKGYRIDDSYTFCFSLHKYDLIAFQKDEKSKVEFAYYINCDSSNGRFYLAWHDKGSKEQQFRISTQNLVLIQKYQVNELGKEIRPCRLKKRPPVR

SEQ ID NO: 210 - protein, 1300 aa, Francisella tularensis
  REGION 1..1300: note = MISC_FEATURE - wild type Cpf1 polypeptide sequence
  source 1..1300: note = subspecies novicida
MSIYQEFVNKYSLSKTLRFELIPQGKTLENIKARGLILDDEKRAKDYKKAKQIIDKYHQFFIEEILSSVCISEDLLQNYSDVYFKLKKSDDDNLQKDFKSAKDTIKKQISEYIKDSEKFKNLFNQNLIDAKKGQESDLILWLKQSKDNGIELFKANSDITDIDEALEIIKSFKGWTTYFKGFHENRKNVYSSNDIPTSIIYRIVDDNLPKFLENKAKYESLKDKAPEAINYEQIKKDLAEELTFDIDYKTSEVNQRVFSLDEVFEIANFNNYLNQSGITKFNTIIGGKFVNGENTKRKGINEYINLYSQQINDKTLKKYKMSVLFKQILSDTESKSFVIDKLEDDSDVVTTMQSFYEQIAAFKTVEEKSIKETLSLLFDDLKAQKLDLSKIYFKNDKSLTDLSQQVFDDYSVIGTAVLEYITQQIAPKNLDNPSKKEQELIAKKTEKAKYLSLETIKLALEEFNKHRDIDKQCRFEEILANFAAIPMIFDEIAQNKDNLAQISIKYQNQGKKDLLQASAEDDVKAIKDLLDQTNNLLHKLKIFHISQSEDKANILDKDEHFYLVFEECYFELANIVPLYNKIRNYITQKPYSDEKFKLNFENSTLANGWDKNKEPDNTAILFIKDDKYYLGVMNKKNNKIFDDKAIKENKGEGYKKIVYKLLPGANKMLPKVFFSAKSIKFYNPSEDILRIRNHSTHTKNGSPQKGYEKFEFNIEDCRKFIDFYKQSISKHPEWKDFGFRFSDTQRYNSIDEFYREVENQGYKLTFENISESYIDSVVNQGKLYLFQIYNKDFSAYSKGRPNLHTLYWKALFDERNLQDVVYKLNGEAELFYRKQSIPKKITHPAKEAIANKNKDNPKKESVFEYDLIKDKRFTEDKFFFHCPITINFKSSGANKFNDEINLLLKEKANDVHILSIDRGERHLAYYTLVDGKGNIIKQDTFNIIGNDRMKTNYHDKLAAIEKDRDSARKDWKKINNIKEMKEGYLSQVVHEIAKLVIEYNAIVVFEDLNFGFKRGRFKVEKQVYQKLEKMLIEKLNYLVFKDNEFDKTGGVLRAYQLTAPFETFKKMGKQTGIIYYVPAGFTSKICPVTGFVNQLYPKYESVSKSQEFFSKFDKICYNLDKGYFEFSFDYKNFGDKAAKGKWTIASFGSRLINFRNSDKNHNWDTREVYPTKELEKLLKDYSIEYGHGECIKAAICGESDKKFFAKLTSVLNTILQMRNSKTGTELDYLISPVADVNGNFFDSRQAPKNMPQDADANGAYHIGLKGLMLLGRIKNNQEGKKLNLVIKNEEYFEFVQNRNN

SEQ ID NO: 211 - protein, 1300 aa, Francisella tularensis
  REGION 1..1300: note = MISC_FEATURE - Cpf1 D917A polypeptide sequence
  source 1..1300: note = subspecies novicida
MSIYQEFVNKYSLSKTLRFELIPQGKTLENIKARGLILDDEKRAKDYKKAKQIIDKYHQFFIEEILSSVCISEDLLQNYSDVYFKLKKSDDDNLQKDFKSAKDTIKKQISEYIKDSEKFKNLFNQNLIDAKKGQESDLILWLKQSKDNGIELFKANSDITDIDEALEIIKSFKGWTTYFKGFHENRKNVYSSNDIPTSIIYRIVDDNLPKFLENKAKYESLKDKAPEAINYEQIKKDLAEELTFDIDYKTSEVNQRVFSLDEVFEIANFNNYLNQSGITKFNTIIGGKFVNGENTKRKGINEYINLYSQQINDKTLKKYKMSVLFKQILSDTESKSFVIDKLEDDSDVVTTMQSFYEQIAAFKTVEEKSIKETLSLLFDDLKAQKLDLSKIYFKNDKSLTDLSQQVFDDYSVIGTAVLEYITQQIAPKNLDNPSKKEQELIAKKTEKAKYLSLETIKLALEEFNKHRDIDKQCRFEEILANFAAIPMIFDEIAQNKDNLAQISIKYQNQGKKDLLQASAEDDVKAIKDLLDQTNNLLHKLKIFHISQSEDKANILDKDEHFYLVFEECYFELANIVPLYNKIRNYITQKPYSDEKFKLNFENSTLANGWDKNKEPDNTAILFIKDDKYYLGVMNKKNNKIFDDKAIKENKGEGYKKIVYKLLPGANKMLPKVFFSAKSIKFYNPSEDILRIRNHSTHTKNGSPQKGYEKFEFNIEDCRKFIDFYKQSISKHPEWKDFGFRFSDTQRYNSIDEFYREVENQGYKLTFENISESYIDSVVNQGKLYLFQIYNKDFSAYSKGRPNLHTLYWKALFDERNLQDVVYKLNGEAELFYRKQSIPKKITHPAKEAIANKNKDNPKKESVFEYDLIKDKRFTEDKFFFHCPITINFKSSGANKFNDEINLLLKEKANDVHILSIARGERHLAYYTLVDGKGNIIKQDTFNIIGNDRMKTNYHDKLAAIEKDRDSARKDWKKINNIKEMKEGYLSQVVHEIAKLVIEYNAIVVFEDLNFGFKRGRFKVEKQVYQKLEKMLIEKLNYLVFKDNEFDKTGGVLRAYQLTAPFETFKKMGKQTGIIYYVPAGFTSKICPVTGFVNQLYPKYESVSKSQEFFSKFDKICYNLDKGYFEFSFDYKNFGDKAAKGKWTIASFGSRLINFRNSDKNHNWDTREVYPTKELEKLLKDYSIEYGHGECIKAAICGESDKKFFAKLTSVLNTILQMRNSKTGTELDYLISPVADVNGNFFDSRQAPKNMPQDADANGAYHIGLKGLMLLGRIKNNQEGKKLNLVIKNEEYFEFVQNRNN

SEQ ID NO: 212 - protein, 1300 aa, Francisella tularensis
  REGION 1..1300: note = MISC_FEATURE - Cpf1 E1006A polypeptide sequence
  source 1..1300: note = subspecies novicida
MSIYQEFVNKYSLSKTLRFELIPQGKTLENIKARGLILDDEKRAKDYKKAKQIIDKYHQFFIEEILSSVCISEDLLQNYSDVYFKLKKSDDDNLQKDFKSAKDTIKKQISEYIKDSEKFKNLFNQNLIDAKKGQESDLILWLKQSKDNGIELFKANSDITDIDEALEIIKSFKGWTTYFKGFHENRKNVYSSNDIPTSIIYRIVDDNLPKFLENKAKYESLKDKAPEAINYEQIKKDLAEELTFDIDYKTSEVNQRVFSLDEVFEIANFNNYLNQSGITKFNTIIGGKFVNGENTKRKGINEYINLYSQQINDKTLKKYKMSVLFKQILSDTESKSFVIDKLEDDSDVVTTMQSFYEQIAAFKTVEEKSIKETLSLLFDDLKAQKLDLSKIYFKNDKSLTDLSQQVFDDYSVIGTAVLEYITQQIAPKNLDNPSKKEQELIAKKTEKAKYLSLETIKLALEEFNKHRDIDKQCRFEEILANFAAIPMIFDEIAQNKDNLAQISIKYQNQGKKDLLQASAEDDVKAIKDLLDQTNNLLHKLKIFHISQSEDKANILDKDEHFYLVFEECYFELANIVPLYNKIRNYITQKPYSDEKFKLNFENSTLANGWDKNKEPDNTAILFIKDDKYYLGVMNKKNNKIFDDKAIKENKGEGYKKIVYKLLPGANKMLPKVFFSAKSIKFYNPSEDILRIRNHSTHTKNGSPQKGYEKFEFNIEDCRKFIDFYKQSISKHPEWKDFGFRFSDTQRYNSIDEFYREVENQGYKLTFENISESYIDSVVNQGKLYLFQIYNKDFSAYSKGRPNLHTLYWKALFDERNLQDVVYKLNGEAELFYRKQSIPKKITHPAKEAIANKNKDNPKKESVFEYDLIKDKRFTEDKFFFHCPITINFKSSGANKFNDEINLLLKEKANDVHILSIDRGERHLAYYTLVDGKGNIIKQDTFNIIGNDRMKTNYHDKLAAIEKDRDSARKDWKKINNIKEMKEGYLSQVVHEIAKLVIEYNAIVVFADLNFGFKRGRFKVEKQVYQKLEKMLIEKLNYLVFKDNEFDKTGGVLRAYQLTAPFETFKKMGKQTGIIYYVPAGFTSKICPVTGFVNQLYPKYESVSKSQEFFSKFDKICYNLDKGYFEFSFDYKNFGDKAAKGKWTIASFGSRLINFRNSDKNHNWDTREVYPTKELEKLLKDYSIEYGHGECIKAAICGESDKKFFAKLTSVLNTILQMRNSKTGTELDYLISPVADVNGNFFDSRQAPKNMPQDADANGAYHIGLKGLMLLGRIKNNQEGKKLNLVIKNEEYFEFVQNRNN

SEQ ID NO: 213 - protein, 1300 aa, Francisella tularensis
  REGION 1..1300: note = MISC_FEATURE - Cpf1 D1255A polypeptide sequence
  source 1..1300: note = subspecies novicida
MSIYQEFVNKYSLSKTLRFELIPQGKTLENIKARGLILDDEKRAKDYKKAKQIIDKYHQFFIEEILSSVCISEDLLQNYSDVYFKLKKSDDDNLQKDFKSAKDTIKKQISEYIKDSEKFKNLFNQNLIDAKKGQESDLILWLKQSKDNGIELFKANSDITDIDEALEIIKSFKGWTTYFKGFHENRKNVYSSNDIPTSIIYRIVDDNLPKFLENKAKYESLKDKAPEAINYEQIKKDLAEELTFDIDYKTSEVNQRVFSLDEVFEIANFNNYLNQSGITKFNTIIGGKFVNGENTKRKGINEYINLYSQQINDKTLKKYKMSVLFKQILSDTESKSFVIDKLEDDSDVVTTMQSFYEQIAAFKTVEEKSIKETLSLLFDDLKAQKLDLSKIYFKNDKSLTDLSQQVFDDYSVIGTAVLEYITQQIAPKNLDNPSKKEQELIAKKTEKAKYLSLETIKLALEEFNKHRDIDKQCRFEEILANFAAIPMIFDEIAQNKDNLAQISIKYQNQGKKDLLQASAEDDVKAIKDLLDQTNNLLHKLKIFHISQSEDKANILDKDEHFYLVFEECYFELANIVPLYNKIRNYITQKPYSDEKFKLNFENSTLANGWDKNKEPDNTAILFIKDDKYYLGVMNKKNNKIFDDKAIKENKGEGYKKIVYKLLPGANKMLPKVFFSAKSIKFYNPSEDILRIRNHSTHTKNGSPQKGYEKFEFNIEDCRKFIDFYKQSISKHPEWKDFGFRFSDTQRYNSIDEFYREVENQGYKLTFENISESYIDSVVNQGKLYLFQIYNKDFSAYSKGRPNLHTLYWKALFDERNLQDVVYKLNGEAELFYRKQSIPKKITHPAKEAIANKNKDNPKKESVFEYDLIKDKRFTEDKFFFHCPITINFKSSGANKFNDEINLLLKEKANDVHILSIDRGERHLAYYTLVDGKGNIIKQDTFNIIGNDRMKTNYHDKLAAIEKDRDSARKDWKKINNIKEMKEGYLSQVVHEIAKLVIEYNAIVVFEDLNFGFKRGRFKVEKQVYQKLEKMLIEKLNYLVFKDNEFDKTGGVLRAYQLTAPFETFKKMGKQTGIIYYVPAGFTSKICPVTGFVNQLYPKYESVSKSQEFFSKFDKICYNLDKGYFEFSFDYKNFGDKAAKGKWTIASFGSRLINFRNSDKNHNWDTREVYPTKELEKLLKDYSIEYGHGECIKAAICGESDKKFFAKLTSVLNTILQMRNSKTGTELDYLISPVADVNGNFFDSRQAPKNMPQDAAANGAYHIGLKGLMLLGRIKNNQEGKKLNLVIKNEEYFEFVQNRNN

SEQ ID NO: 214 - protein, 1300 aa, Francisella tularensis
  REGION 1..1300: note = MISC_FEATURE - Cpf1 D917A/E1006A polypeptide sequence
  source 1..1300: note = subspecies novicida
MSIYQEFVNKYSLSKTLRFELIPQGKTLENIKARGLILDDEKRAKDYKKAKQIIDKYHQFFIEEILSSVCISEDLLQNYSDVYFKLKKSDDDNLQKDFKSAKDTIKKQISEYIKDSEKFKNLFNQNLIDAKKGQESDLILWLKQSKDNGIELFKANSDITDIDEALEIIKSFKGWTTYFKGFHENRKNVYSSNDIPTSIIYRIVDDNLPKFLENKAKYESLKDKAPEAINYEQIKKDLAEELTFDIDYKTSEVNQRVFSLDEVFEIANFNNYLNQSGITKFNTIIGGKFVNGENTKRKGINEYINLYSQQINDKTLKKYKMSVLFKQILSDTESKSFVIDKLEDDSDVVTTMQSFYEQIAAFKTVEEKSIKETLSLLFDDLKAQKLDLSKIYFKNDKSLTDLSQQVFDDYSVIGTAVLEYITQQIAPKNLDNPSKKEQELIAKKTEKAKYLSLETIKLALEEFNKHRDIDKQCRFEEILANFAAIPMIFDEIAQNKDNLAQISIKYQNQGKKDLLQASAEDDVKAIKDLLDQTNNLLHKLKIFHISQSEDKANILDKDEHFYLVFEECYFELANIVPLYNKIRNYITQKPYSDEKFKLNFENSTLANGWDKNKEPDNTAILFIKDDKYYLGVMNKKNNKIFDDKAIKENKGEGYKKIVYKLLPGANKMLPKVFFSAKSIKFYNPSEDILRIRNHSTHTKNGSPQKGYEKFEFNIEDCRKFIDFYKQSISKHPEWKDFGFRFSDTQRYNSIDEFYREVENQGYKLTFENISESYIDSVVNQGKLYLFQIYNKDFSAYSKGRPNLHTLYWKALFDERNLQDVVYKLNGEAELFYRKQSIPKKITHPAKEAIANKNKDNPKKESVFEYDLIKDKRFTEDKFFFHCPITINFKSSGANKFNDEINLLLKEKANDVHILSIARGERHLAYYTLVDGKGNIIKQDTFNIIGNDRMKTNYHDKLAAIEKDRDSARKDWKKINNIKEMKEGYLSQVVHEIAKLVIEYNAIVVFADLNFGFKRGRFKVEKQVYQKLEKMLIEKLNYLVFKDNEFDKTGGVLRAYQLTAPFETFKKMGKQTGIIYYVPAGFTSKICPVTGFVNQLYPKYESVSKSQEFFSKFDKICYNLDKGYFEFSFDYKNFGDKAAKGKWTIASFGSRLINFRNSDKNHNWDTREVYPTKELEKLLKDYSIEYGHGECIKAAICGESDKKFFAKLTSVLNTILQMRNSKTGTELDYLISPVADVNGNFFDSRQAPKNMPQDADANGAYHIGLKGLMLLGRIKNNQEGKKLNLVIKNEEYFEFVQNRNN

SEQ ID NO: 215 - protein, 1300 aa, Francisella tularensis
  REGION 1..1300: note = MISC_FEATURE - Cpf1 D917A/D1255A polypeptide sequence
  source 1..1300: note = subspecies novicida
MSIYQEFVNKYSLSKTLRFELIPQGKTLENIKARGLILDDEKRAKDYKKAKQIIDKYHQFFIEEILSSVCISEDLLQNYSDVYFKLKKSDDDNLQKDFKSAKDTIKKQISEYIKDSEKFKNLFNQNLIDAKKGQESDLILWLKQSKDNGIELFKANSDITDIDEALEIIKSFKGWTTYFKGFHENRKNVYSSNDIPTSIIYRIVDDNLPKFLENKAKYESLKDKAPEAINYEQIKKDLAEELTFDIDYKTSEVNQRVFSLDEVFEIANFNNYLNQSGITKFNTIIGGKFVNGENTKRKGINEYINLYSQQINDKTLKKYKMSVLFKQILSDTESKSFVIDKLEDDSDVVTTMQSFYEQIAAFKTVEEKSIKETLSLLFDDLKAQKLDLSKIYFKNDKSLTDLSQQVFDDYSVIGTAVLEYITQQIAPKNLDNPSKKEQELIAKKTEKAKYLSLETIKLALEEFNKHRDIDKQCRFEEILANFAAIPMIFDEIAQNKDNLAQISIKYQNQGKKDLLQASAEDDVKAIKDLLDQTNNLLHKLKIFHISQSEDKANILDKDEHFYLVFEECYFELANIVPLYNKIRNYITQKPYSDEKFKLNFENSTLANGWDKNKEPDNTAILFIKDDKYYLGVMNKKNNKIFDDKAIKENKGEGYKKIVYKLLPGANKMLPKVFFSAKSIKFYNPSEDILRIRNHSTHTKNGSPQKGYEKFEFNIEDCRKFIDFYKQSISKHPEWKDFGFRFSDTQRYNSIDEFYREVENQGYKLTFENISESYIDSVVNQGKLYLFQIYNKDFSAYSKGRPNLHTLYWKALFDERNLQDVVYKLNGEAELFYRKQSIPKKITHPAKEAIANKNKDNPKKESVFEYDLIKDKRFTEDKFFFHCPITINFKSSGANKFNDEINLLLKEKANDVHILSIARGERHLAYYTLVDGKGNIIKQDTFNIIGNDRMKTNYHDKLAAIEKDRDSARKDWKKINNIKEMKEGYLSQVVHEIAKLVIEYNAIVVFEDLNFGFKRGRFKVEKQVYQKLEKMLIEKLNYLVFKDNEFDKTGGVLRAYQLTAPFETFKKMGKQTGIIYYVPAGFTSKICPVTGFVNQLYPKYESVSKSQEFFSKFDKICYNLDKGYFEFSFDYKNFGDKAAKGKWTIASFGSRLINFRNSDKNHNWDTREVYPTKELEKLLKDYSIEYGHGECIKAAICGESDKKFFAKLTSVLNTILQMRNSKTGTELDYLISPVADVNGNFFDSRQAPKNMPQDAAANGAYHIGLKGLMLLGRIKNNQEGKKLNLVIKNEEYFEFVQNRNN

SEQ ID NO: 216 - protein, 1300 aa, Francisella tularensis
  REGION 1..1300: note = MISC_FEATURE - Cpf1 E1006A/D1255A polypeptide sequence
  source 1..1300: note = subspecies novicida
MSIYQEFVNKYSLSKTLRFELIPQGKTLENIKARGLILDDEKRAKDYKKAKQIIDKYHQFFIEEILSSVCISEDLLQNYSDVYFKLKKSDDDNLQKDFKSAKDTIKKQISEYIKDSEKFKNLFNQNLIDAKKGQESDLILWLKQSKDNGIELFKANSDITDIDEALEIIKSFKGWTTYFKGFHENRKNVYSSNDIPTSIIYRIVDDNLPKFLENKAKYESLKDKAPEAINYEQIKKDLAEELTFDIDYKTSEVNQRVFSLDEVFEIANFNNYLNQSGITKFNTIIGGKFVNGENTKRKGINEYINLYSQQINDKTLKKYKMSVLFKQILSDTESKSFVIDKLEDDSDVVTTMQSFYEQIAAFKTVEEKSIKETLSLLFDDLKAQKLDLSKIYFKNDKSLTDLSQQVFDDYSVIGTAVLEYITQQIAPKNLDNPSKKEQELIAKKTEKAKYLSLETIKLALEEFNKHRDIDKQCRFEEILANFAAIPMIFDEIAQNKDNLAQISIKYQNQGKKDLLQASAEDDVKAIKDLLDQTNNLLHKLKIFHISQSEDKANILDKDEHFYLVFEECYFELANIVPLYNKIRNYITQKPYSDEKFKLNFENSTLANGWDKNKEPDNTAILFIKDDKYYLGVMNKKNNKIFDDKAIKENKGEGYKKIVYKLLPGANKMLPKVFFSAKSIKFYNPSEDILRIRNHSTHTKNGSPQKGYEKFEFNIEDCRKFIDFYKQSISKHPEWKDFGFRFSDTQRYNSIDEFYREVENQGYKLTFENISESYIDSVVNQGKLYLFQIYNKDFSAYSKGRPNLHTLYWKALFDERNLQDVVYKLNGEAELFYRKQSIPKKITHPAKEAIANKNKDNPKKESVFEYDLIKDKRFTEDKFFFHCPITINFKSSGANKFNDEINLLLKEKANDVHILSIDRGERHLAYYTLVDGKGNIIKQDTFNIIGNDRMKTNYHDKLAAIEKDRDSARKDWKKINNIKEMKEGYLSQVVHEIAKLVIEYNAIVVFADLNFGFKRGRFKVEKQVYQKLEKMLIEKLNYLVFKDNEFDKTGGVLRAYQLTAPFETFKKMGKQTGIIYYVPAGFTSKICPVTGFVNQLYPKYESVSKSQEFFSKFDKICYNLDKGYFEFSFDYKNFGDKAAKGKWTIASFGSRLINFRNSDKNHNWDTREVYPTKELEKLLKDYSIEYGHGECIKAAICGESDKKFFAKLTSVLNTILQMRNSKTGTELDYLISPVADVNGNFFDSRQAPKNMPQDAAANGAYHIGLKGLMLLGRIKNNQEGKKLNLVIKNEEYFEFVQNRNN

SEQ ID NO: 217 - protein, 1300 aa, Francisella tularensis
  REGION 1..1300: note = MISC_FEATURE - Cpf1 D917A/E1006A/D1255A polypeptide sequence
  source 1..1300: note = subspecies novicida
MSIYQEFVNKYSLSKTLRFELIPQGKTLENIKARGLILDDEKRAKDYKKAKQIIDKYHQFFIEEILSSVCISEDLLQNYSDVYFKLKKSDDDNLQKDFKSAKDTIKKQISEYIKDSEKFKNLFNQNLIDAKKGQESDLILWLKQSKDNGIELFKANSDITDIDEALEIIKSFKGWTTYFKGFHENRKNVYSSNDIPTSIIYRIVDDNLPKFLENKAKYESLKDKAPEAINYEQIKKDLAEELTFDIDYKTSEVNQRVFSLDEVFEIANFNNYLNQSGITKFNTIIGGKFVNGENTKRKGINEYINLYSQQINDKTLKKYKMSVLFKQILSDTESKSFVIDKLEDDSDVVTTMQSFYEQIAAFKTVEEKSIKETLSLLFDDLKAQKLDLSKIYFKNDKSLTDLSQQVFDDYSVIGTAVLEYITQQIAPKNLDNPSKKEQELIAKKTEKAKYLSLETIKLALEEFNKHRDIDKQCRFEEILANFAAIPMIFDEIAQNKDNLAQISIKYQNQGKKDLLQASAEDDVKAIKDLLDQTNNLLHKLKIFHISQSEDKANILDKDEHFYLVFEECYFELANIVPLYNKIRNYITQKPYSDEKFKLNFENSTLANGWDKNKEPDNTAILFIKDDKYYLGVMNKKNNKIFDDKAIKENKGEGYKKIVYKLLPGANKMLPKVFFSAKSIKFYNPSEDILRIRNHSTHTKNGSPQKGYEKFEFNIEDCRKFIDFYKQSISKHPEWKDFGFRFSDTQRYNSIDEFYREVENQGYKLTFENISESYIDSVVNQGKLYLFQIYNKDFSAYSKGRPNLHTLYWKALFDERNLQDVVYKLNGEAELFYRKQSIPKKITHPAKEAIANKNKDNPKKESVFEYDLIKDKRFTEDKFFFHCPITINFKSSGANKFNDEINLLLKEKANDVHILSIARGERHLAYYTLVDGKGNIIKQDTFNIIGNDRMKTNYHDKLAAIEKDRDSARKDWKKINNIKEMKEGYLSQVVHEIAKLVIEYNAIVVFADLNFGFKRGRFKVEKQVYQKLEKMLIEKLNYLVFKDNEFDKTGGVLRAYQLTAPFETFKKMGKQTGIIYYVPAGFTSKICPVTGFVNQLYPKYESVSKSQEFFSKFDKICYNLDKGYFEFSFDYKNFGDKAAKGKWTIASFGSRLINFRNSDKNHNWDTREVYPTKELEKLLKDYSIEYGHGECIKAAICGESDKKFFAKLTSVLNTILQMRNSKTGTELDYLISPVADVNGNFFDSRQAPKNMPQDAAANGAYHIGLKGLMLLGRIKNNQEGKKLNLVIKNEEYFEFVQNRNN

SEQ ID NO: 218 - protein, 1052 aa, Staphylococcus aureus
  REGION 1..1052: note = MISC_FEATURE - Exemplary SaCas9 polypeptide sequence
KRNYILGLDIGITSVGYGIIDYETRDVIDAGVRLFKEANVENNEGRRSKRGARRLKRRRRHRIQRVKKLLFDYNLLTDHSELSGINPYEARVKGLSQKLSEEEFSAALLHLAKRRGVHNVNEVEEDTGNELSTKEQISRNSKALEEKYVAELQLERLKKDGEVRGSINRFKTSDYVKEAKQLLKVQKAYHQLDQSFIDTYIDLLETRRTYYEGPGEGSPFGWKDIKEWYEMLMGHCTYFPEELRSVKYAYNADLYNALNDLNNLVITRDENEKLEYYEKFQIIENVFKQKKKPTLKQIAKEILVNEEDIKGYRVTSTGKPEFTNLKVYHDIKDITARKEIIENAELLDQIAKILTIYQSSEDIQEELTNLNSELTQEEIEQISNLKGYTGTHNLSLKAINLILDELWHTNDNQIAIFNRLKLVPKKVDLSQQKEIPTTLVDDFILSPVVKRSFIQSIKVINAIIKKYGLPNDIIIELAREKNSKDAQKMINEMQKRNRQTNERIEEIIRTTGKENAKYLIEKIKLHDMQEGKCLYSLEAIPLEDLLNNPFNYEVDHIIPRSVSFDNSFNNKVLVKQEENSKKGNRTPFQYLSSSDSKISYETFKKHILNLAKGKGRISKTKKEYLLEERDINRFSVQKDFINRNLVDTRYATRGLMNLLRSYFRVNNLDVKVKSINGGFTSFLRRKWKFKKERNKGYKHHAEDALIIANADFIFKEWKKLDKAKKVMENQMFEEKQAESMPEIETEQEYKEIFITPHQIKHIKDFKDYKYSHRVDKKPNRELINDTLYSTRKDDKGNTLIVNNLNGLYDKDNDKLKKLINKSPEKLLMYHHDPQTYQKLKLIMEQYGDEKNPLYKYYEETGNYLTKYSKKDNGPVIKKIKYYGNKLNAHLDITDDYPNSRNKVVKLSLKPYRFDVYLDNGVYKFVTVKNLDVIKKENYYEVNSKCYEEAKKLKKISNQAEFIASFYNNDLIKINGELYRVIGVNNDLLNRIEVNMIDITYREYLENMNDKRPPRIIKTIASKTQSIKKYSTDILGNLYEVKSKKHPQIIKKG

SEQ ID NO: 219 - protein, 1052 aa, Staphylococcus aureus
  REGION 1..1052: note = MISC_FEATURE - SaCas9n polypeptide sequence
KRNYILGLDIGITSVGYGIIDYETRDVIDAGVRLFKEANVENNEGRRSKRGARRLKRRRRHRIQRVKKLLFDYNLLTDHSELSGINPYEARVKGLSQKLSEEEFSAALLHLAKRRGVHNVNEVEEDTGNELSTKEQISRNSKALEEKYVAELQLERLKKDGEVRGSINRFKTSDYVKEAKQLLKVQKAYHQLDQSFIDTYIDLLETRRTYYEGPGEGSPFGWKDIKEWYEMLMGHCTYFPEELRSVKYAYNADLYNALNDLNNLVITRDENEKLEYYEKFQIIENVFKQKKKPTLKQIAKEILVNEEDIKGYRVTSTGKPEFTNLKVYHDIKDITARKEIIENAELLDQIAKILTIYQSSEDIQEELTNLNSELTQEEIEQISNLKGYTGTHNLSLKAINLILDELWHTNDNQIAIFNRLKLVPKKVDLSQQKEIPTTLVDDFILSPVVKRSFIQSIKVINAIIKKYGLPNDIIIELAREKNSKDAQKMINEMQKRNRQTNERIEEIIRTTGKENAKYLIEKIKLHDMQEGKCLYSLEAIPLEDLLNNPFNYEVDHIIPRSVSFDNSFNNKVLVKQEEASKKGNRTPFQYLSSSDSKISYETFKKHILNLAKGKGRISKTKKEYLLEERDINRFSVQKDFINRNLVDTRYATRGLMNLLRSYFRVNNLDVKVKSINGGFTSFLRRKWKFKKERNKGYKHHAEDALIIANADFIFKEWKKLDKAKKVMENQMFEEKQAESMPEIETEQEYKEIFITPHQIKHIKDFKDYKYSHRVDKKPNRELINDTLYSTRKDDKGNTLIVNNLNGLYDKDNDKLKKLINKSPEKLLMYHHDPQTYQKLKLIMEQYGDEKNPLYKYYEETGNYLTKYSKKDNGPVIKKIKYYGNKLNAHLDITDDYPNSRNKVVKLSLKPYRFDVYLDNGVYKFVTVKNLDVIKKENYYEVNSKCYEEAKKLKKISNQAEFIASFYNNDLIKINGELYRVIGVNNDLLNRIEVNMIDITYREYLENMNDKRPPRIIKTIASKTQSIKKYSTDILGNLYEVKSKKHPQIIKKG

SEQ ID NO: 220 - protein, 1052 aa, Staphylococcus aureus
  REGION 1..1052: note = MISC_FEATURE - SaKKH Cas9 polypeptide sequence
KRNYILGLDIGITSVGYGIIDYETRDVIDAGVRLFKEANVENNEGRRSKRGARRLKRRRRHRIQRVKKLLFDYNLLTDHSELSGINPYEARVKGLSQKLSEEEFSAALLHLAKRRGVHNVNEVEEDTGNELSTKEQISRNSKALEEKYVAELQLERLKKDGEVRGSINRFKTSDYVKEAKQLLKVQKAYHQLDQSFIDTYIDLLETRRTYYEGPGEGSPFGWKDIKEWYEMLMGHCTYFPEELRSVKYAYNADLYNALNDLNNLVITRDENEKLEYYEKFQIIENVFKQKKKPTLKQIAKEILVNEEDIKGYRVTSTGKPEFTNLKVYHDIKDITARKEIIENAELLDQIAKILTIYQSSEDIQEELTNLNSELTQEEIEQISNLKGYTGTHNLSLKAINLILDELWHTNDNQIAIFNRLKLVPKKVDLSQQKEIPTTLVDDFILSPVVKRSFIQSIKVINAIIKKYGLPNDIIIELAREKNSKDAQKMINEMQKRNRQTNERIEEIIRTTGKENAKYLIEKIKLHDMQEGKCLYSLEAIPLEDLLNNPFNYEVDHIIPRSVSFDNSFNNKVLVKQEEASKKGNRTPFQYLSSSDSKISYETFKKHILNLAKGKGRISKTKKEYLLEERDINRFSVQKDFINRNLVDTRYATRGLMNLLRSYFRVNNLDVKVKSINGGFTSFLRRKWKFKKERNKGYKHHAEDALIIANADFIFKEWKKLDKAKKVMENQMFEEKQAESMPEIETEQEYKEIFITPHQIKHIKDFKDYKYSHRVDKKPNRKLINDTLYSTRKDDKGNTLIVNNLNGLYDKDNDKLKKLINKSPEKLLMYHHDPQTYQKLKLIMEQYGDEKNPLYKYYEETGNYLTKYSKKDNGPVIKKIKYYGNKLNAHLDITDDYPNSRNKVVKLSLKPYRFDVYLDNGVYKFVTVKNLDVIKKENYYEVNSKCYEEAKKLKKISNQAEFIASFYKNDLIKINGELYRVIGVNNDLLNRIEVNMIDITYREYLENMNDKRPPHIIKTIASKTQSIKKYSTDILGNLYEVKSKKHPQIIKKG

SEQ ID NO: 221 - protein, 707 aa, synthetic construct
  REGION 1..707: note = Casphi-1 polypeptide sequence
MADTPTLFTQFLRHHLPGQRFRKDILKQAGRILANKGEDATIAFLRGKSEESPPDFQPPVKCPIIACSRPLTEWPIYQASVAIQGYVYGQSLAEFEASDPGCSKDGLLGWFDKTGVCTDYFSVQGLNLIFQNARKRYIGVQTKVTNRNEKRHKKLKRINAKRIAEGLPELTSDEPESALDETGHLIDPPGLNTNIYCYQQVSPKPLALSEVNQLPTAYAGYSTSGDDPIQPMVTKDRLSISKGQPGYIPEHQRALLSQKKHRRMRGYGLKARALLVIVRIQDDWAVIDLRSLLRNAYWRRIVQTKEPSTITKLLKLVTGDPVLDATRMVATFTYKPGIVQVRSAKCLKNKQGSKLFSERYLNETVSVTSIDLGSNNLVAVATYRLVNGNTPELLQRFTLPSHLVKDFERYKQAHDTLEDSIQKTAVASLPQGQQTEIRMWSMYGFREAQERVCQELGLADGSIPWNVMTATSTILTDLFLARGGDPKKCMFTSEPKKKKNSKQVLYKIRDRAWAKMYRTLLSKETREAWNKALWGLKRGSPDYARLSKRKEELARRCVNYTISTAEKRAQCGRTIVALEDLNIGFFHGRGKQEPGWVGLFTRKKENRWLMQALHKAFLELAHHRGYHVIEVNPAYTSQTCPVCRHCDPDNRDQHNREAFHCIGCGFRGNADLDVATHNIAMVAITGESLKRARGSVASKTPQPLAAE

SEQ ID NO: 222 - protein, 757 aa, synthetic construct
  REGION 1..757: note = Casphi-2 polypeptide sequence
MPKPAVESEFSKVLKKHFPGERFRSSYMKRGGKILAAQGEEAVVAYLQGKSEEEPPNFQPPAKCHVVTKSRDFAEWPIMKASEAIQRYIYALSTTERAACKPGKSSESHAAWFAATGVSNHGYSHVQGLNLIFDHTLGRYDGVLKKVQLRNEKARARLESINASRADEGLPEIKAEEEEVATNETGHLLQPPGINPSFYVYQTISPQAYRPRDEIVLPPEYAGYVRDPNAPIPLGVVRNRCDIQKGCPGYIPEWQREAGTAISPKTGKAVTVPGLSPKKNKRMRRYWRSEKEKAQDALLVTVRIGTDWVVIDVRGLLRNARWRTIAPKDISLNALLDLFTGDPVIDVRRNIVTFTYTLDACGTYARKWTLKGKQTKATLDKLTATQTVALVAIDLGQTNPISAGISRVTQENGALQCEPLDRFTLPDDLLKDISAYRIAWDRNEEELRARSVEALPEAQQAEVRALDGVSKETARTQLCADFGLDPKRLPWDKMSSNTTFISEALLSNSVSRDQVFFTPAPKKGAKKKAPVEVMRKDRTWARAYKPRLSVEAQKLKNEALWALKRTSPEYLKLSRRKEELCRRSINYVIEKTRRRTQCQIVIPVIEDLNVRFFHGSGKRLPGWDNFFTAKKENRWFIQGLHKAFSDLRTHRSFYVFEVRPERTSITCPKCGHCEVGNRDGEAFQCLSCGKTCNADLDVATHNLTQVALTGKTMPKREEPRDAQGTAPARKTKKASKSKAPPAEREDQTPAQEPSQTS

SEQ ID NO: 223 - protein, 766 aa, synthetic construct
  REGION 1..766: note = Casphi-3 polypeptide sequence
MEKEITELTKIRREFPNKKFSSTDMKKAGKLLKAEGPDAVRDFLNSCQEIIGDFKPPVKTNIVSISRPFEEWPVSMVGRAIQEYYFSLTKEELESVHPGTSSEDHKSFFNITGLSNYNYTSVQGLNLIFKNAKAIYDGTLVKANNKNKKLEKKFNEINHKRSLEGLPIITPDFEEPFDENGHLNNPPGINRNIYGYQGCAAKVFVPSKHKMVSLPKEYEGYNRDPNLSLAGFRNRLEIPEGEPGHVPWFQRMDIPEGQIGHVNKIQRFNFVHGKNSGKVKFSDKTGRVKRYHHSKYKDATKPYKFLEESKKVSALDSILAIITIGDDWVVFDIRGLYRNVFYRELAQKGLTAVQLLDLFTGDPVIDPKKGVVTFSYKEGVVPVFSQKIVPRFKSRDTLEKLTSQGPVALLSVDLGQNEPVAARVCSLKNINDKITLDNSCRISFLDDYKKQIKDYRDSLDELEIKIRLEAINSLETNQQVEIRDLDVFSADRAKANTVDMFDIDPNLISWDSMSDARVSTQISDLYLKNGGDESRVYFEINNKRIKRSDYNISQLVRPKLSDSTRKNLNDSIWKLKRTSEEYLKLSKRKLELSRAVVNYTIRQSKLLSGINDIVIILEDLDVKKKFNGRGIRDIGWDNFFSSRKENRWFIPAFHKAFSELSSNRGLCVIEVNPAWTSATCPDCGFCSKENRDGINFTCRKCGVSYHADIDVATLNIARVAVLGKPMSGPADRERLGDTKKPRVARSRKTMKRKDISNSTVEAMVTA

SEQ ID NO: 224 - protein, 765 aa, synthetic construct
  REGION 1..765: note = Casphi-4 polypeptide sequence
MYSLEMADLKSEPSLLAKLLRDRFPGKYWLPKYWKLAEKKRLTGGEEAACEYMADKQLDSPPPNFRPPARCVILAKSRPFEDWPVHRVASKAQSFVIGLSEQGFAALRAAPPSTADARRDWLRSHGASEDDLMALEAQLLETIMGNAISLHGGVLKKIDNANVKAAKRLSGRNEARLNKGLQELPPEQEGSAYGADGLLVNPPGLNLNIYCRKSCCPKPVKNTARFVGHYPGYLRDSDSILISGTMDRLTIIEGMPGHIPAWQREQGLVKPGGRRRRLSGSESNMRQKVDPSTGPRRSTRSGTVNRSNQRTGRNGDPLLVEIRMKEDWVLLDARGLLRNLRWRESKRGLSCDHEDLSLSGLLALFSGDPVIDPVRNEVVFLYGEGIIPVRSTKPVGTRQSKKLLERQASMGPLTLISCDLGQTNLIAGRASAISLTHGSLGVRSSVRIELDPEIIKSFERLRKDADRLETEILTAAKETLSDEQRGEVNSHEKDSPQTAKASLCRELGLHPPSLPWGQMGPSTTFIADMLISHGRDDDAFLSHGEFPTLEKRKKFDKRFCLESRPLLSSETRKALNESLWEVKRTSSEYARLSQRKKEMARRAVNFVVEISRRKTGLSNVIVNIEDLNVRIFHGGGKQAPGWDGFFRPKSENRWFIQAIHKAFSDLAAHHGIPVIESDPQRTSMTCPECGHCDSKNRNGVRFLCKGCGASMDADFDAACRNLERVALTGKPMPKPSTSCERLLSATTGKVCSDHSLSHDAIEKAS

SEQ ID NO: 225 - protein, 793 aa, synthetic construct
  REGION 1..793: note = Casphi-5 polypeptide sequence
MSSLPTPLELLKQKHADLFKGLQFSSKDNKMAGKVLKKDGEEAALAFLSERGVSRGELPNFRPPAKTLVVAQSRPFEEFPIYRVSEAIQLYVYSLSVKELETVPSGSSTKKEHQRFFQDSSVPDFGYTSVQGLNKIFGLARGIYLGVITRGENQLQKAKSKHEALNKKRRASGEAETEFDPTPYEYMTPERKLAKPPGVNHSIMCYVDISVDEFDFRNPDGIVLPSEYAGYCREINTAIEKGTVDRLGHLKGGPGYIPGHQRKESTTEGPKINFRKGRIRRSYTALYAKRDSRRVRQGKLALPSYRHHMMRLNSNAESAILAVIFFGKDWVVFDLRGLLRNVRWRNLFVDGSTPSTLLGMFGDPVIDPKRGVVAFCYKEQIVPVVSKSITKMVKAPELLNKLYLKSEDPLVLVAIDLGQTNPVGVGVYRVMNASLDYEVVTRFALESELLREIESYRQRTNAFEAQIRAETFDAMTSEEQEEITRVRAFSASKAKENVCHRFGMPVDAVDWATMGSNTIHIAKWVMRHGDPSLVEVLEYRKDNEIKLDKNGVPKKVKLTDKRIANLTSIRLRFSQETSKHYNDTMWELRRKHPVYQKLSKSKADFSRRVVNSIIRRVNHLVPRARIVFIIEDLKNLGKVFHGSGKRELGWDSYFEPKSENRWFIQVLHKAFSETGKHKGYYIIECWPNWTSCTCPKCSCCDSENRHGEVFRCLACGYTCNTDFGTAPDNLVKIATTGKGLPGPKKRCKGSSKGKNPKIARSSETGVSVTESGAPKVKKSSPTQTSQSSSQSAP

SEQ ID NO: 226 - protein, 441 aa, synthetic construct
  REGION 1..441: note = Casphi-6 polypeptide sequence
MNKIEKEKTPLAKLMNENFAGLRFPFAIIKQAGKKLLKEGELKTIEYMTGKGSIEPLPNFKPPVKCLIVAKRRDLKYFPICKASCEIQSYVYSLNYKDFMDYFSTPMTSQKQHEEFFKKSGLNIEYQNVAGLNLIFNNVKNTYNGVILKVKNRNEKLKKKAIKNNYEFEEIKTFNDDGCLINKPGINNVIYCFQSISPKILKNITHLPKEYNDYDCSVDRNIIQKYVSRLDIPESQPGHVPEWQRKLPEFNNTNNPRRRRKWYSNGRNISKGYSVDQVNQAKIEDSLLAQIKIGEDWIILDIRGLLRDLNRRELISYKNKLTIKDVLGFFSDYPIIDIKKNLVTFCYKEGVIQVVSQKSIGNKKSKQLLEKLIENKPIALVSIDLGQTNPVSVKISKLNKINNKISIESFTYRFLNEEILKEIEKYRKDYDKLELKLINEA

SEQ ID NO: 227 - protein, 772 aa, synthetic construct
  REGION 1..772: note = Casphi-7 polypeptide sequence
MSNTAVSTREHMSNKTTPPSPLSLLLRAHFPGLKFESQDYKIAGKKLRDGGPEAVISYLTGKGQAKLKDVKPPAKAFVIAQSRPFIEWDLVRVSRQIQEKIFGIPATKGRPKQDGLSETAFNEAVASLEVDGKSKLNEETRAAFYEVLGLDAPSLHAQAQNALIKSAISIREGVLKKVENRNEKNLSKTKRRKEAGEEATFVEEKAHDERGYLIHPPGVNQTIPGYQAVVIKSCPSDFIGLPSGCLAKESAEALTDYLPHDRMTIPKGQPGYVPEWQHPLLNRRKNRRRRDWYSASLNKPKATCSKRSGTPNRKNSRTDQIQSGRFKGAIPVLMRFQDEWVIIDIRGLLRNARYRKLLKEKSTIPDLLSLFTGDPSIDMRQGVCTFIYKAGQACSAKMVKTKNAPEILSELTKSGPVVLVSIDLGQTNPIAAKVSRVTQLSDGQLSHETLLRELLSNDSSDGKEIARYRVASDRLRDKLANLAVERLSPEHKSEILRAKNDTPALCKARVCAALGLNPEMIAWDKMTPYTEFLATAYLEKGGDRKVATLKPKNRPEMLRRDIKFKGTEGVRIEVSPEAAEAYREAQWDLQRTSPEYLRLSTWKQELTKRILNQLRHKAAKSSQCEVVVMAFEDLNIKMMHGNGKWADGGWDAFFIKKRENRWFMQAFHKSLTELGAHKGVPTIEVTPHRTSITCTKCGHCDKANRDGERFACQKCGFVAHADLEIATDNIERVALTGKPMPKPESERSGDAKKSVGARKAAFKPEEDAEAAE

SEQ ID NO: 228 - protein, 717 aa, synthetic construct
  REGION 1..717: note = Casphi-8 polypeptide sequence
MIKPTVSQFLTPGFKLIRNHSRTAGLKLKNEGEEACKKFVRENEIPKDECPNFQGGPAIANIIAKSREFTEWEIYQSSLAIQEVIFTLPKDKLPEPILKEEWRAQWLSEHGLDTVPYKEAAGLNLIIKNAVNTYKGVQVKVDNKNKNNLAKINRKNEIAKLNGEQEISFEEIKAFDDKGYLLQKPSPNKSIYCYQSVSPKPFITSKYHNVNLPEEYIGYYRKSNEPIVSPYQFDRLRIPIGEPGYVPKWQYTFLSKKENKRRKLSKRIKNVSPILGIICIKKDWCVFDMRGLLRTNHWKKYHKPTDSINDLFDYFTGDPVIDTKANVVRFRYKMENGIVNYKPVREKKGKELLENICDQNGSCKLATVDVGQNNPVAIGLFELKKVNGELTKTLISRHPTPIDFCNKITAYRERYDKLESSIKLDAIKQLTSEQKIEVDNYNNNFTPQNTKQIVCSKLNINPNDLPWDKMISGTHFISEKAQVSNKSEIYFTSTDKGKTKDVMKSDYKWFQDYKPKLSKEVRDALSDIEWRLRRESLEFNKLSKSREQDARQLANWISSMCDVIGIENLVKKNNFFGGSGKREPGWDNFYKPKKENRWWINAIHKALTELSQNKGKRVILLPAMRTSITCPKCKYCDSKNRNGEKFNCLKCGIELNADIDVATENLATVAITAQSMPKPTCERSGDAKKPVRARKAKAPEFHDKLAPSYTVVLREAV

SEQ ID NO: 229 - protein, 793 aa, synthetic construct
  REGION 1..793: note = Casphi-9 polypeptide sequence
MRSSREIGDKILMRQPAEKTAFQVFRQEVIGTQKLSGGDAKTAGRLYKQGKMEAAREWLLKGARDDVPPNFQPPAKCLVVAVSHPFEEWDISKTNHDVQAYIYAQPLQAEGHLNGLSEKWEDTSADQHKLWFEKTGVPDRGLPVQAINKIAKAAVNRAFGVVRKVENRNEKRRSRDNRIAEHNRENGLTEVVREAPEVATNADGFLLHPPGIDPSILSYASVSPVPYNSSKHSFVRLPEEYQAYNVEPDAPIPQFVVEDRFAIPPGQPGYVPEWQRLKCSTNKHRRMRQWSNQDYKPKAGRRAKPLEFQAHLTRERAKGALLVVMRIKEDWVVFDVRGLLRNVEWRKVLSEEAREKLTLKGLLDLFTGDPVIDTKRGIVTFLYKAEITKILSKRTVKTKNARDLLLRLTEPGEDGLRREVGLVAVDLGQTHPIAAAIYRIGRTSAGALESTVLHRQGLREDQKEKLKEYRKRHTALDSRLRKEAFETLSVEQQKEIVTVSGSGAQITKDKVCNYLGVDPSTLPWEKMGSYTHFISDDFLRRGGDPNIVHFDRQPKKGKVSKKSQRIKRSDSQWVGRMRPRLSQETAKARMEADWAAQNENEEYKRLARSKQELARWCVNTLLQNTRCITQCDEIVVVIEDLNVKSLHGKGAREPGWDNFFTPKTENRWFIQILHKTFSELPKHRGEHVIEGCPLRTSITCPACSYCDKNSRNGEKFVCVACGATFHADFEVATYNLVRLATTGMPMPKSLERQGGGEKAGGARKARKKAKQVEKIVVQANANVTMNGASLHSP

SEQ ID NO: 230 - protein, 812 aa, synthetic construct
  REGION 1..812: note = Casphi-10 polypeptide sequence
MDMLDTETNYATETPAQQQDYSPKPPKKAQRAPKGFSKKARPEKKPPKPITLFTQKHFSGVRFLKRVIRDASKILKLSESRTITFLEQAIERDGSAPPDVTPPVHNTIMAVTRPFEEWPEVILSKALQKHCYALTKKIKIKTWPKKGPGKKCLAAWSARTKIPLIPGQVQATNGLFDRIGSIYDGVEKKVTNRNANKKLEYDEAIKEGRNPAVPEYETAYNIDGTLINKPGYNPNLYITQSRTPRLITEADRPLVEKILWQMVEKKTQSRNQARRARLEKAAHLQGLPVPKFVPEKVDRSQKIEIRIIDPLDKIEPYMPQDRMAIKASQDGHVPYWQRPFLSKRRNRRVRAGWGKQVSSIQAWLTGALLVIVRLGNEAFLADIRGALRNAQWRKLLKPDATYQSLFNLFTGDPVVNTRTNHLTMAYREGVVNIVKSRSFKGRQTREHLLTLLGQGKTVAGVSFDLGQKHAAGLLAAHFGLGEDGNPVFTPIQACFLPQRYLDSLTNYRNRYDALTLDMRRQSLLALTPAQQQEFADAQRDPGGQAKRACCLKLNLNPDEIRWDLVSGISTMISDLYIERGGDPRDVHQQVETKPKGKRKSEIRILKIRDGKWAYDFRPKIADETRKAQREQLWKLQKASSEFERLSRYKINIARAIANWALQWGRELSGCDIVIPVLEDLNVGSKFFDGKGKWLLGWDNRFTPKKENRWFIKVLHKAVAELAPHRGVPVYEVMPHRTSMTCPACHYCHPTNREGDRFECQSCHVVKNTDRDVAPYNILRVAVEGKTLDRWQAEKKPQAEPDRPMILIDNQES

SEQ ID NO: 231 - protein, 84 aa, synthetic construct
  REGION 1..84: note = synthetic polypeptide sequence
MTNLSDIIEKETGKQLVIQESILMLPEEVEEVIGNKPESDILVHTAYDESTDENVMLLTSDAPEYKPWALVIQDSNGENKIKML

SEQ ID NO: 232 - protein, 1129 aa, Alicyclobacillus acidoterrestris
  REGION 1..1129: note = MISC_FEATURE - Cas12b/C2c1; sp|T0D7A2|C2C1_ALIAG CRISPR-associated endonuclease C2c1 OS = Alicyclobacillus acido-terrestris (strain ATCC 49025 /DSM 3922/ CIP 106132 / NCIMB 13137/GD3B) GN=c2c1 PE=1 SV=1; Cas12b/C2c1 polypeptide sequence
MAVKSIKVKLRLDDMPEIRAGLWKLHKEVNAGVRYYTEWLSLLRQENLYRRSPNGDGEQECDKTAEECKAELLERLRARQVENGHRGPAGSDDELLQLARQLYELLVPQAIGAKGDAQQIARKFLSPLADKDAVGGLGIAKAGNKPRWVRMREAGEPGWEEEKEKAETRKSADRTADVLRALADFGLKPLMRVYTDSEMSSVEWKPLRKGQAVRTWDRDMFQQAIERMMSWESWNQRVGQEYAKLVEQKNRFEQKNFVGQEHLVHLVNQLQQDMKEASPGLESKEQTAHYVTGRALRGSDKVFEKWGKLAPDAPFDLYDAEIKNVQRRNTRRFGSHDLFAKLAEPEYQALWREDASFLTRYAVYNSILRKLNHAKMFATFTLPDATAHPIWTRFDKLGGNLHQYTFLFNEFGERRHAIRFHKLLKVENGVAREVDDVTVPISMSEQLDNLLPRDPNEPIALYFRDYGAEQHFTGEFGGAKIQCRRDQLAHMHRRRGARDVYLNVSVRVQSQSEARGERRPPYAAVFRLVGDNHRAFVHFDKLSDYLAEHPDDGKLGSEGLLSGLRVMSVDLGLRTSASISVFRVARKDELKPNSKGRVPFFFPIKGNDNLVAVHERSQLLKLPGETESKDLRAIREERQRTLRQLRTQLAYLRLLVRCGSEDVGRRERSWAKLIEQPVDAANHMTPDWREAFENELQKLKSLHGICSDKEWMDAVYESVRRVWRHMGKQVRDWRKDVRSGERPKIRGYAKDVVGGNSIEQIEYLERQYKFLKSWSFFGKVSGQVIRAEKGSRFAITLREHIDHAKEDRLKKLADRIIMEALGYVYALDERGKGKWVAKYPPCQLILLEELSEYQFNNDRPPSENNQLMQWSHRGVFQELINQAQVHDLLVGTMYAAFSSRFDARTGAPGIRCRRVPARCTQEHNPEPFPWWLNKFVVEHTLDACPLRADDLIPTGEGEIFVSPFSAEEGDFHQIHADLNAAQNLQQRLWSDFDISQIRLRCDWGEVDGELVLIPRLTGKRTADSYSNKVFYTNTGVTYYERERGKKRRKVFAQEKLSEEEAELLVEADEAREKSVVLMRDPSGIINRGNWTRQKEFWSMVNQRIEGYLVKQIRSRVPLQDSACENTGDI

SEQ ID NO: 233 - protein, 1368 aa, Mus musculus
  REGION 1..1368: note = MISC_FEATURE - high fidelity Cas9 polypeptide sequence
MDKKYSIGLAIGTNSVGWAVITDEYKVPSKKFKVLGNTDRHSIKKNLIGALLFDSGETAEATRLKRTARRRYTRRKNRICYLQEIFSNEMAKVDDSFFHRLEESFLVEEDKKHERHPIFGNIVDEVAYHEKYPTIYHLRKKLVDSTDKADLRLIYLALAHMIKFRGHFLIEGDLNPDNSDVDKLFIQLVQTYNQLFEENPINASGVDAKAILSARLSKSRRLENLIAQLPGEKKNGLFGNLIALSLGLTPNFKSNFDLAEDAKLQLSKDTYDDDLDNLLAQIGDQYADLFLAAKNLSDAILLSDILRVNTEITKAPLSASMIKRYDEHHQDLTLLKALVRQQLPEKYKEIFFDQSKNGYAGYIDGGASQEEFYKFIKPILEKMDGTEELLVKLNREDLLRKQRTFDNGSIPHQIHLGELHAILRRQEDFYPFLKDNREKIEKILTFRIPYYVGPLARGNSRFAWMTRKSEETITPWNFEEVVDKGASAQSFIERMTAFDKNLPNEKVLPKHSLLYEYFTVYNELTKVKYVTEGMRKPAFLSGEQKKAIVDLLFKTNRKVTVKQLKEDYFKKIECFDSVEISGVEDRFNASLGTYHDLLKIIKDKDFLDNEENEDILEDIVLTLTLFEDREMIEERLKTYAHLFDDKVMKQLKRRRYTGWGALSRKLINGIRDKQSGKTILDFLKSDGFANRNFMALIHDDSLTFKEDIQKAQVSGQGDSLHEHIANLAGSPAIKKGILQTVKVVDELVKVMGRHKPENIVIEMARENQTTQKGQKNSRERMKRIEEGIKELGSQILKEHPVENTQLQNEKLYLYYLQNGRDMYVDQELDINRLSDYDVDHIVPQSFLKDDSIDNKVLTRSDKNRGKSDNVPSEEVVKKMKNYWRQLLNAKLITQRKFDNLTKAERGGLSELDKAGFIKRQLVETRAITKHVAQILDSRMNTKYDENDKLIREVKVITLKSKLVSDFRKDFQFYKVREINNYHHAHDAYLNAVVGTALIKKYPKLESEFVYGDYKVYDVRKMIAKSEQEIGKATAKYFFYSNIMNFFKTEITLANGEIRKRPLIETNGETGEIVWDKGRDFATVRKVLSMPQVNIVKKTEVQTGGFSKESILPKRNSDKLIARKKDWDPKKYGGFDSPTVAYSVLVVAKVEKGKSKKLKSVKELLGITIMERSSFEKNPIDFLEAKGYKEVKKDLIIKLPKYSLFELENGRKRMLASAGELQKGNELALPSKYVNFLYLASHYEKLKGSPEDNEQKQLFVEQHKHYLDEIIEQISEFSKRVILADANLDKVLSAYNKHRDKPIREQAENIIHLFTLTNLGAPAAFKYFDTTIDRKRYTSTKEVLDATLIHQSITGLYETRIDLSQLGGD

SEQ ID NO: 234 - protein, 1368 aa, Streptococcus pyogenes
  REGION 1..1368: note = MISC_FEATURE - PAM-binding SpEQR Cas9 polypeptide sequence
MDKKYSIGLAIGTNSVGWAVITDEYKVPSKKFKVLGNTDRHSIKKNLIGALLFDSGETAEATRLKRTARRRYTRRKNRICYLQEIFSNEMAKVDDSFFHRLEESVLVEEDKKHERHPIFGNIVDEVAYHEKYPTIYHLRKKLVDSTDKADLRLIYLALAHMIKFRGHFLIEGDLNPDNSDVDKLFIQLVQTYNQLFEENPINASGVDAKAILSARLSKSRRLENLIAQLPGEKKNGLFGNLIALSLGLTPNFKSNFDLAEDAKLQLSKDTYDDDLDNLLAQIGDQYADLFLAAKNLSDAILLSDILRVNTEITKAPLSASMIKRYDEHHQDLTLLKALVRQQLPEKYKEIFFDQSKNGYAGYIDGGASQEEFYKFIKPILEKMDGTEELLVKLNREDLLRKQRTFDNGSIPHQIHLGELHAILRRQEDFYPFLKDNREKIEKILTFRIPYYVGPLARGNSRFAWMTRKSEETITPWNFEEVVDKGASAQSFIERMTNFDKNLPNEKVLPKHSLLYEYFTVYNELTKVKYVTEGMRKPAFLSGEQKKAIVDLLFKTNRKVTVKQLKEDYFKKIECFDSVEISGVEDRFNASLGTYHDLLKIIKDKDFLDNEENEDILEDIVLTLTLFEDREMIEERLKTYAHLFDDKVMKQLKRRRYTGWGRLSRKLINGIRDKQSGKTILDFLKSDGFANRNFMQLIHDDSLTFKEDIQKAQVSGQGDSLHEHIANLAGSPAIKKGILQTVKVVDELVKVMGRHKPENIVIEMARENQTTQKGQKNSRERMKRIEEGIKELGSQILKEHPVENTQLQNEKLYLYYLQNGRDMYVDQELDINRLSDYDVDHIVPQSFLKDDSIDNKVLTRSDKNRGKSDNVPSEEVVKKMKNYWRQLLNAKLITQRKFDNLTKAERGGLSELDKAGFIKRQLVETRQITKHVAQILDSRMNTKYDENDKLIREVKVITLKSKLVSDFRKDFQFYKVREINNYHHAHDAYLNAVVGTALIKKYPKLESEFVYGDYKVYDVRKMIAKSEQEIGKATAKYFFYSNIMNFFKTEITLANGEIRKRPLIETNGETGEIVWDKGRDFATVRKVLSMPQVNIVKKTEVQTGGFSKESILPKRNSDKLIARKKDWDPKKYGGFESPTVAYSVLVVAKVEKGKSKKLKSVKELLGITIMERSSFEKNPIDFLEAKGYKEVKKDLIIKLPKYSLFELENGRKRMLASAGELQKGNELALPSKYVNFLYLASHYEKLKGSPEDNEQKQLFVEQHKHYLDEIIEQISEFSKRVILADANLDKVLSAYNKHRDKPIREQAENIIHLFTLTNLGAPAAFKYFDTTIDRKQYRSTKEVLDATLIHQSITGLYETRIDLSQLGGD

SEQ ID NO: 235 - protein, 1368 aa, Streptococcus pyogenes
  REGION 1..1368: note = MISC_FEATURE - PAM-binding SpVQR Cas9 polypeptide sequence
MDKKYSIGLAIGTNSVGWAVITDEYKVPSKKFKVLGNTDRHSIKKNLIGALLFDSGETAEATRLKRTARRRYTRRKNRICYLQEIFSNEMAKVDDSFFHRLEESFLVEEDKKHERHPIFGNIVDEVAYHEKYPTIYHLRKKLVDSTDKADLRLIYLALAHMIKFRGHFLIEGDLNPDNSDVDKLFIQLVQTYNQLFEENPINASGVDAKAILSARLSKSRRLENLIAQLPGEKKNGLFGNLIALSLGLTPNFKSNFDLAEDAKLQLSKDTYDDDLDNLLAQIGDQYADLFLAAKNLSDAILLSDILRVNTEITKAPLSASMIKRYDEHHQDLTLLKALVRQQLPEKYKEIFFDQSKNGYAGYIDGGASQEEFYKFIKPILEKMDGTEELLVKLNREDLLRKQRTFDNGSIPHQIHLGELHAILRRQEDFYPFLKDNREKIEKILTFRIPYYVGPLARGNSRFAWMTRKSEETITPWNFEEVVDKGASAQSFIERMTNFDKNLPNEKVLPKHSLLYEYFTVYNELTKVKYVTEGMRKPAFLSGEQKKAIVDLLFKTNRKVTVKQLKEDYFKKIECFDSVEISGVEDRFNASLGTYHDLLKIIKDKDFLDNEENEDILEDIVLTLTLFEDREMIEERLKTYAHLFDDKVMKQLKRRRYTGWGRLSRKLINGIRDKQSGKTILDFLKSDGFANRNFMQLIHDDSLTFKEDIQKAQVSGQGDSLHEHIANLAGSPAIKKGILQTVKVVDELVKVMGRHKPENIVIEMARENQTTQKGQKNSRERMKRIEEGIKELGSQILKEHPVENTQLQNEKLYLYYLQNGRDMYVDQELDINRLSDYDVDHIVPQSFLKDDSIDNKVLTRSDKNRGKSDNVPSEEVVKKMKNYWRQLLNAKLITQRKFDNLTKAERGGLSELDKAGFIKRQLVETRQITKHVAQILDSRMNTKYDENDKLIREVKVITLKSKLVSDFRKDFQFYKVREINNYHHAHDAYLNAVVGTALIKKYPKLESEFVYGDYKVYDVRKMIAKSEQEIGKATAKYFFYSNIMNFFKTEITLANGEIRKRPLIETNGETGEIVWDKGRDFATVRKVLSMPQVNIVKKTEVQTGGFSKESILPKRNSDKLIARKKDWDPKKYGGFVSPTVAYSVLVVAKVEKGKSKKLKSVKELLGITIMERSSFEKNPIDFLEAKGYKEVKKDLIIKLPKYSLFELENGRKRMLASAGELQKGNELALPSKYVNFLYLASHYEKLKGSPEDNEQKQLFVEQHKHYLDEIIEQISEFSKRVILADANLDKVLSAYNKHRDKPIREQAENIIHLFTLTNLGAPAAFKYFDTTIDRKQYRSTKEVLDATLIHQSITGLYETRIDLSQLGGD

SEQ ID NO: 236 - protein, 1368 aa, Streptococcus pyogenes
  REGION 1..1368: note = MISC_FEATURE - SpVQR Cas9 polypeptide sequence
MDKKYSIGLAIGTNSVGWAVITDEYKVPSKKFKVLGNTDRHSIKKNLIGALLFDSGETAEATRLKRTARRRYTRRKNRICYLQEIFSNEMAKVDDSFFHRLEESFLVEEDKKHERHPIFGNIVDEVAYHEKYPTIYHLRKKLVDSTDKADLRLIYLALAHMIKFRGHFLIEGDLNPDNSDVDKLFIQLVQTYNQLFEENPINASGVDAKAILSARLSKSRRLENLIAQLPGEKKNGLFGNLIALSLGLTPNFKSNFDLAEDAKLQLSKDTYDDDLDNLLAQIGDQYADLFLAAKNLSDAILLSDILRVNTEITKAPLSASMIKRYDEHHQDLTLLKALVRQQLPEKYKEIFFDQSKNGYAGYIDGGASQEEFYKFIKPILEKMDGTEELLVKLNREDLLRKQRTFDNGSIPHQIHLGELHAILRRQEDFYPFLKDNREKIEKILTFRIPYYVGPLARGNSRFAWMTRKSEETITPWNFEEVVDKGASAQSFIERMTNFDKNLPNEKVLPKHSLLYEYFTVYNELTKVKYVTEGMRKPAFLSGEQKKAIVDLLFKTNRKVTVKQLKEDYFKKIECFDSVEISGVEDRFNASLGTYHDLLKIIKDKDFLDNEENEDILEDIVLTLTLFEDREMIEERLKTYAHLFDDKVMKQLKRRRYTGWGRLSRKLINGIRDKQSGKTILDFLKSDGFANRNFMQLIHDDSLTFKEDIQKAQVSGQGDSLHEHIANLAGSPAIKKGILQTVKVVDELVKVMGRHKPENIVIEMARENQTTQKGQKNSRERMKRIEEGIKELGSQILKEHPVENTQLQNEKLYLYYLQNGRDMYVDQELDINRLSDYDVDHIVPQSFLKDDSIDNKVLTRSDKNRGKSDNVPSEEVVKKMKNYWRQLLNAKLITQRKFDNLTKAERGGLSELDKAGFIKRQLVETRQITKHVAQILDSRMNTKYDENDKLIREVKVITLKSKLVSDFRKDFQFYKVREINNYHHAHDAYLNAVVGTALIKKYPKLESEFVYGDYKVYDVRKMIAKSEQEIGKATAKYFFYSNIMNFFKTEITLANGEIRKRPLIETNGETGEIVWDKGRDFATVRKVLSMPQVNIVKKTEVQTGGFSKESILPKRNSDKLIARKKDWDPKKYGGFVSPTVAYSVLVVAKVEKGKSKKLKSVKELLGITIMERSSFEKNPIDFLEAKGYKEVKKDLIIKLPKYSLFELENGRKRMLASARELQKGNELALPSKYVNFLYLASHYEKLKGSPEDNEQKQLFVEQHKHYLDEIIEQISEFSKRVILADANLDKVLSAYNKHRDKPIREQAENIIHLFTLTNLGAPAAFKYFDTTIDRKEYRSTKEVLDATLIHQSITGLYETRIDLSQLGGD

SEQ ID NO: 237 - protein, 1359 aa, Streptococcus macacae
  REGION 1..1359: note = MISC_FEATURE - SpyMacCas9 polypeptide sequence
MDKKYSIGLDIGTNSVGWAVITDDYKVPSKKFKVLGNTDRHSIKKNLIGALLFGSGETAEATRLKRTARRRYTRRKNRICYLQEIFSNEMAKVDDSFFHRLEESFLVEEDKKHERHPIFGNIVDEVAYHEKYPTIYHLRKKLADSTDKADLRLIYLALAHMIKFRGHFLIEGDLNPDNSDVDKLFIQLVQIYNQLFEENPINASRVDAKAILSARLSKSRRLENLIAQLPGEKRNGLFGNLIALSLGLTPNFKSNFDLAEDAKLQLSKDTYDDDLDNLLAQIGDQYADLFLAAKNLSDAILLSDILRVNSEITKAPLSASMIKRYDEHHQDLTLLKALVRQQLPEKYKEIFFDQSKNGYAGYIDGGASQEEFYKFIKPILEKMDGTEELLVKLNREDLLRKQRTFDNGSIPHQIHLGELHAILRRQEDFYPFLKDNREKIEKILTFRIPYYVGPLARGNSRFAWMTRKSEETITPWNFEEVVDKGASAQSFIERMTNFDKNLPNEKVLPKHSLLYEYFTVYNELTKVKYVTEGMRKPAFLSGEQKKAIVDLLFKTNRKVTVKQLKEDYFKKIECFDSVEISGVEDRFNASLGAYHDLLKIIKDKDFLDNEENEDILEDIVLTLTLFEDRGMIEERLKTYAHLFDDKVMKQLKRRRYTGWGRLSRKLINGIRDKQSGKTILDFLKSDGFANRNFMQLIHDDSLTFKEDIQKAQVSGQGHSLHEQIANLAGSPAIKKGILQTVKIVDELVKVMGHKPENIVIEMARENQTTQKGQKNSRERMKRIEEGIKELGSQILKEHPVENTQLQNEKLYLYYLQNGRDMYVDQELDINRLSDYDVDHIVPQSFIKDDSIDNKVLTRSDKNRGKSDNVPSEEVVKKMKNYWRQLLNAKLITQRKFDNLTKAERGGLSELDKAGFIKRQLVETRQITKHVAQILDSRMNTKYDENDKLIREVKVITLKSKLVSDFRKDFQFYKVREINNYHHAHDAYLNAVVGTALIKKYPKLESEFVYGDYKVYDVRKMIAKSEQEIGKATAKYFFYSNIMNFFKTEITLANGEIRKRPLIETNGETGEIVWDKGRDFATVRKVLSMPQVNIVKKTEIQTVGQNGGLFDDNPKSPLEVTPSKLVPLKKELNPKKYGGYQKPTTAYPVLLITDTKQLIPISVMNKKQFEQNPVKFLRDRGYQQVGKNDFIKLPKYTLVDIGDGIKRLWASSKEIHKGNQLVVSKKSQILLYHAHHLDSDLSNDYLQNHNQQFDVLFNEIISFSKKCKLGKEHIQKIENVYSNKKNSASIEELAESFIKLLGFTQLGATSPFNFLGVKLNQKQYKGKKDYILPCTEGTLIRQSITGLYETRVDLSKIGED

SEQ ID NO: 238 - protein, 1410 aa, synthetic construct
  REGION 1..1410: note = CP5 polypeptide sequence
  REGION 1..341: note = MISC_FEATURE - Sequence derived from Cas9
  REGION 342..362: note = MISC_FEATURE - Linker sequence
  REGION 363..1388: note = MISC_FEATURE - Sequence derived from Cas9
  REGION 1389..1410: note = MISC_FEATURE - Bipartite nuclear localization sequence
EIGKATAKYFFYSNIMNFFKTEITLANGEIRKRPLIETNGETGEIVWDKGRDFATVRKVLSMPQVNIVKKTEVQTGGFSKESILPKRNSDKLIARKKDWDPKKYGGFMQPTVAYSVLVVAKVEKGKSKKLKSVKELLGITIMERSSFEKNPIDFLEAKGYKEVKKDLIIKLPKYSLFELENGRKRMLASAKFLQKGNELALPSKYVNFLYLASHYEKLKGSPEDNEQKQLFVEQHKHYLDEIIEQISEFSKRVILADANLDKVLSAYNKHRDKPIREQAENIIHLFTLTNLGAPRAFKYFDTTIARKEYRSTKEVLDATLIHQSITGLYETRIDLSQLGGDGGSGGSGGSGGSGGSGGSGGMDKKYSIGLAIGTNSVGWAVITDEYKVPSKKFKVLGNTDRHSIKKNLIGALLFDSGETAEATRLKRTARRRYTRRKNRICYLQEIFSNEMAKVDDSFFHRLEESFLVEEDKKHERHPIFGNIVDEVAYHEKYPTIYHLRKKLVDSTDKADLRLIYLALAHMIKFRGHFLIEGDLNPDNSDVDKLFIQLVQTYNQLFEENPINASGVDAKAILSARLSKSRRLENLIAQLPGEKKNGLFGNLIALSLGLTPNFKSNFDLAEDAKLQLSKDTYDDDLDNLLAQIGDQYADLFLAAKNLSDAILLSDILRVNTEITKAPLSASMIKRYDEHHQDLTLLKALVRQQLPEKYKEIFFDQSKNGYAGYIDGGASQEEFYKFIKPILEKMDGTEELLVKLNREDLLRKQRTFDNGSIPHQIHLGELHAILRRQEDFYPFLKDNREKIEKILTFRIPYYVGPLARGNSRFAWMTRKSEETITPWNFEEVVDKGASAQSFIERMTNFDKNLPNEKVLPKHSLLYEYFTVYNELTKVKYVTEGMRKPAFLSGEQKKAIVDLLFKTNRKVTVKQLKEDYFKKIECFDSVEISGVEDRFNASLGTYHDLLKIIKDKDFLDNEENEDILEDIVLTLTLFEDREMIEERLKTYAHLFDDKVMKQLKRRRYTGWGRLSRKLINGIRDKQSGKTILDFLKSDGFANRNFMQLIHDDSLTFKEDIQKAQVSGQGDSLHEHIANLAGSPAIKKGILQTVKVVDELVKVMGRHKPENIVIEMARENQTTQKGQKNSRERMKRIEEGIKELGSQILKEHPVENTQLQNEKLYLYYLQNGRDMYVDQELDINRLSDYDVDHIVPQSFLKDDSIDNKVLTRSDKNRGKSDNVPSEEVVKKMKNYWRQLLNAKLITQRKFDNLTKAERGGLSELDKAGFIKRQLVETRQITKHVAQILDSRMNTKYDENDKLIREVKVITLKSKLVSDFRKDFQFYKVREINNYHHAHDAYLNAVVGTALIKKYPKLESEFVYGDYKVYDVRKMIAKSEQEGADKRTADGSEFESPKKKRKV

SEQ ID NO: 239 - protein, 1302 aa, synthetic construct
  REGION 1..1302: note = Cas12c1 polypeptide sequence
MQTKKTHLHLISAKASRKYRRTIACLSDTAKKDLERRKQSGAADPAQELSCLKTIKFKLEVPEGSKLPSFDRISQIYNALETIEKGSLSYLLFALILSGFRIFPNSSAAKTFASSSCYKNDQFASQIKEIFGEMVKNFIPSELESILKKGRRKNNKDWTEENIKRVLNSEFGRKNSEGSSALFDSFLSKFSQELFRKFDSWNEVNKKYLEAAELLDSMLASYGPFDSVCKMIGDSDSRNSLPDKSTIAFTNNAEITVDIESSVMPYMAIAALLREYRQSKSKAAPVAYVQSHLTTTNGNGLSWFFKFGLDLIRKAPVSSKQSTSDGSKSLQELFSVPDDKLDGLKFIKEACEALPEASLLCGEKGELLGYQDFRTSFAGHIDSWVANYVNRLFELIELVNQLPESIKLPSILTQKNHNLVASLGLQEAEVSHSLELFEGLVKNVRQTLKKLAGIDISSSPNEQDIKEFYAFSDVLNRLGSIRNQIENAVQTAKKDKIDLESAIEWKEWKKLKKLPKLNGLGGGVPKQQELLDKALESVKQIRHYQRIDFERVIQWAVNEHCLETVPKFLVDAEKKKINKESSTDFAAKENAVRFLLEGIGAAARGKTDSVSKAAYNWFVVNNFLAKKDLNRYFINCQGCIYKPPYSKRRSLAFALRSDNKDTIEVVWEKFETFYKEISKEIEKFNIFSQEFQTFLHLENLRMKLLLRRIQKPIPAEIAFFSLPQEYYDSLPPNVAFLALNQEITPSEYITQFNLYSSFLNGNLILLRRSRSYLRAKFSWVGNSKLIYAAKEARLWKIPNAYWKSDEWKMILDSNVLVFDKAGNVLPAPTLKKVCEREGDLRLFYPLLRQLPHDWCYRNPFVKSVGREKNVIEVNKEGEPKVASALPGSLFRLIGPAPFKSLLDDCFFNPLDKDLRECMLIVDQEISQKVEAQKVEASLESCTYSIAVPIRYHLEEPKVSNQFENVLAIDQGEAGLAYAVFSLKSIGEAETKPIAVGTIRIPSIRRLIHSVSTYRKKKQRLQNFKQNYDSTAFIMRENVTGDVCAKIVGLMKEFNAFPVLEYDVKNLESGSRQLSAVYKAVNSHFLYFKEPGRDALRKQLWYGGDSWTIDGIEIVTRERKEDGKEGVEKIVPLKVFPGRSVSARFTSKTCSCCGRNVFDWLFTEKKAKTNKKFNVNSKGELTTADGVIQLFEADRSKGPKFYARRKERTPLTKPIAKGSYSLEEIERRVRTNLRRAPKSKQSRDTSQSQYFCVYKDCALHFSGMQADENAAINIGRRFLTALRKNRRSDFPSNVKISDRLLDN

SEQ ID NO: 240 - protein, 1218 aa, synthetic construct
  REGION 1..1218: note = Cas12c2 polypeptide sequence
MTKHSIPLHAFRNSGADARKWKGRIALLAKRGKETMRTLQFPLEMSEPEAAAINTTPFAVAYNAIEGTGKGTLFDYWAKLHLAGFRFFPSGGAATIFRQQAVFEDASWNAAFCQQSGKDWPWLVPSKLYERFTKAPREVAKKDGSKKSIEFTQENVANESHVSLVGASITDKTPEDQKEFFLKMAGALAEKFDSWKSANEDRIVAMKVIDEFLKSEGLHLPSLENIAVKCSVETKPDNATVAWHDAPMSGVQNLAIGVFATCASRIDNIYDLNGGKLSKLIQESATTPNVTALSWLFGKGLEYFRTTDIDTIMQDFNIPASAKESIKPLVESAQAIPTMTVLGKKNYAPFRPNFGGKIDSWIANYASRLMLLNDILEQIEPGFELPQALLDNETLMSGIDMTGDELKELIEAVYAWVDAAKQGLATLLGRGGNVDDAVQTFEQFSAMMDTLNGTLNTISARYVRAVEMAGKDEARLEKLIECKFDIPKWCKSVPKLVGISGGLPKVEEEIKVMNAAFKDVRARMFVRFEEIAAYVASKGAGMDVYDALEKRELEQIKKLKSAVPERAHIQAYRAVLHRIGRAVQNCSEKTKQLFSSKVIEMGVFKNPSHLNNFIFNQKGAIYRSPFDRSRHAPYQLHADKLLKNDWLELLAEISATLMASESTEQMEDALRLERTRLQLQLSGLPDWEYPASLAKPDIEVEIQTALKMQLAKDTVTSDVLQRAFNLYSSVLSGLTFKLLRRSFSLKMRFSVADTTQLIYVPKVCDWAIPKQYLQAEGEIGIAARVVTESSPAKMVTEVEMKEPKALGHFMQQAPHDWYFDASLGGTQVAGRIVEKGKEVGKERKLVGYRMRGNSAYKTVLDKSLVGNTELSQCSMIIEIPYTQTVDADFRAQVQAGLPKVSINLPVKETITASNKDEQMLFDRFVAIDLGERGLGYAVFDAKTLELQESGHRPIKAITNLLNRTHHYEQRPNQRQKFQAKFNVNLSELRENTVGDVCHQINRICAYYNAFPVLEYMVPDRLDKQLKSVYESVTNRYIWSSTDAHKSARVQFWLGGETWEHPYLKSAKDKKPLVLSPGRGASGKGTSQTCSCCGRNPFDLIKDMKPRAKIAVVDGKAKLENSELKLFERNLESKDDMLARRHRNERAGMEQPLTPGNYTVDEIKALLRANLRRAPKNRRTKDTTVSEYHCVFSDCGKTMHADENAAVNIGGKFIADIEK

SEQ ID NO: 241 - protein, 1252 aa, Oleiphilus sp.
  REGION 1..1252: note = MISC_FEATURE - OspCas12c polypeptide sequence
MTKLRHRQKKLTHDWAGSKKREVLGSNGKLQNPLLMPVKKGQVTEFRKAFSAYARATKGEMTDGRKNMFTHSFEPFKTKPSLHQCELADKAYQSLHSYLPGSLAHFLLSAHALGFRIFSKSGEATAFQASSKIEAYESKLASELACVDLSIQNLTISTLFNALTTSVRGKGEETSADPLIARFYTLLTGKPLSRDTQGPERDLAEVISRKIASSFGTWKEMTANPLQSLQFFEEELHALDANVSLSPAFDVLIKMNDLQGDLKNRTIVFDPDAPVFEYNAEDPADIIIKLTARYAKEAVIKNQNVGNYVKNAITTTNANGLGWLLNKGLSLLPVSTDDELLEFIGVERSHPSCHALIELIAQLEAPELFEKNVFSDTRSEVQGMIDSAVSNHIARLSSSRNSLSMDSEELERLIKSFQIHTPHCSLFIGAQSLSQQLESLPEALQSGVNSADILLGSTQYMLTNSLVEESIATYQRTLNRINYLSGVAGQINGAIKRKAIDGEKIHLPAAWSELISLPFIGQPVIDVESDLAHLKNQYQTLSNEFDTLISALQKNFDLNFNKALLNRTQHFEAMCRSTKKNALSKPEIVSYRDLLARLTSCLYRGSLVLRRAGIEVLKKHKIFESNSELREHVHERKHFVFVSPLDRKAKKLLRLTDSRPDLLHVIDEILQHDNLENKDRESLWLVRSGYLLAGLPDQLSSSFINLPIITQKGDRRLIDLIQYDQINRDAFVMLVTSAFKSNLSGLQYRANKQSFVVTRTLSPYLGSKLVYVPKDKDWLVPSQMFEGRFADILQSDYMVWKDAGRLCVIDTAKHLSNIKKSVFSSEEVLAFLRELPHRTFIQTEVRGLGVNVDGIAFNNGDIPSLKTFSNCVQVKVSRTNTSLVQTLNRWFEGGKVSPPSIQFERAYYKKDDQIHEDAAKRKIRFQMPATELVHASDDAGWTPSYLLGIDPGEYGMGLSLVSINNGEVLDSGFIHINSLINFASKKSNHQTKVVPRQQYKSPYANYLEQSKDSAAGDIAHILDRLIYKLNALPVFEALSGNSQSAADQVWTKVLSFYTWGDNDAQNSIRKQHWFGASHWDIKGMLRQPPTEKKPKPYIAFPGSQVSSYGNSQRCSCCGRNPIEQLREMAKDTSIKELKIRNSEIQLFDGTIKLFNPDPSTVIERRRHNLGPSRIPVADRTFKNISPSSLEFKELITIVSRSIRHSPEFIAKKRGIGSEYFCAYSDCNSSLNSEANAAANVAQKFQKQLFFEL

SEQ ID NO: 242 - protein, 767 aa, synthetic construct
  REGION 1..767: note = Cas12g1 polypeptide sequence
MAQASSTPAVSPRPRPRYREERTLVRKLLPRPGQSKQEFRENVKKLRKAFLQFNADVSGVCQWAIQFRPRYGKPAEPTETFWKFFLEPETSLPPNDSRSPEFRRLQAFEAAAGINGAAALDDPAFTNELRDSILAVASRPKTKEAQRLFSRLKDYQPAHRMILAKVAAEWIESRYRRAHQNWERNYEEWKKEKQEWEQNHPELTPEIREAFNQIFQQLEVKEKRVRICPAARLLQNKDNCQYAGKNKHSVLCNQFNEFKKNHLQGKAIKFFYKDAEKYLRCGLQSLKPNVQGPFREDWNKYLRYMNLKEETLRGKNGGRLPHCKNLGQECEFNPHTALCKQYQQQLSSRPDLVQHDELYRKWRREYWREPRKPVFRYPSVKRHSIAKIFGENYFQADFKNSVVGLRLDSMPAGQYLEFAFAPWPRNYRPQPGETEISSVHLHFVGTRPRIGFRFRVPHKRSRFDCTQEELDELRSRTFPRKAQDQKFLEAARKRLLETFPGNAEQELRLLAVDLGTDSARAAFFIGKTFQQAFPLKIVKIEKLYEQWPNQKQAGDRRDASSKQPRPGLSRDHVGRHLQKMRAQASEIAQKRQELTGTPAPETTTDQAAKKATLQPFDLRGLTVHTARMIRDWARLNARQIIQLAEENQVDLIVLESLRGFRPPGYENLDQEKKRRVAFFAHGRIRRKVTEKAVERGMRVVTVPYLASSKVCAECRKKQKDNKQWEKNKKRGLFKCEGCGSQAQVDENAARVLGRVFWGEIELPTAIP

SEQ ID NO: 243 - protein, 870 aa, synthetic construct
  REGION 1..870: note = Cas12h1 polypeptide sequence
MKVHEIPRSQLLKIKQYEGSFVEWYRDLQEDRKKFASLLFRWAAFGYAAREDDGATYISPSQALLERRLLLGDAEDVAIKFLDVLFKGGAPSSSCYSLFYEDFALRDKAKYSGAKREFIEGLATMPLDKIIERIRQDEQLSKIPAEEWLILGAEYSPEEIWEQVAPRIVNVDRSLGKQLRERLGIKCRRPHDAGYCKILMEVVARQLRSHNETYHEYLNQTHEMKTKVANNLTNEFDLVCEFAEVLEEKNYGLGWYVLWQGVKQALKEQKKPTKIQIAVDQLRQPKFAGLLTAKWRALKGAYDTWKLKKRLEKRKAFPYMPNWDNDYQIPVGLTGLGVFTLEVKRTEVVVDLKEHGKLFCSHSHYFGDLTAEKHPSRYHLKFRHKLKLRKRDSRVEPTIGPWIEAALREITIQKKPNGVFYLGLPYALSHGIDNFQIAKRFFSAAKPDKEVINGLPSEMVVGAADLNLSNIVAPVKARIGKGLEGPLHALDYGYGELIDGPKILTPDGPRCGELISLKRDIVEIKSAIKEFKACQREGLTMSEETTTWLSEVESPSDSPRCMIQSRIADTSRRLNSFKYQMNKEGYQDLAEALRLLDAMDSYNSLLESYQRMHLSPGEQSPKEAKFDTKRASFRDLLRRRVAHTIVEYFDDCDIVFFEDLDGPSDSDSRNNALVKLLSPRTLLLYIRQALEKRGIGMVEVAKDGTSQNNPISGHVGWRNKQNKSEIYFYEDKELLVMDADEVGAMNILCRGLNHSVCPYSFVTKAPEKKNDEKKEGDYGKRVKRFLKDRYGSSNVRFLVASMGFVTVTTKRPKDALVGKRLYYHGGELVTHDLHNRMKDEIKYLVEKEVLARRVSLSDSTIKSYKSFAHV

SEQ ID NO: 244 - protein, 1093 aa, synthetic construct
  REGION 1..1093: note = Cas12i1 polypeptide sequence
MSNKEKNASETRKAYTTKMIPRSHDRMKLLGNFMDYLMDGTPIFFELWNQFGGGIDRDIISGTANKDKISDDLLLAVNWFKVMPINSKPQGVSPSNLANLFQQYSGSEPDIQAQEYFASNFDTEKHQWKDMRVEYERLLAELQLSRSDMHHDLKLMYKEKCIGLSLSTAHYITSVMFGTGAKNNRQTKHQFYSKVIQLLEESTQINSVEQLASIILKAGDCDSYRKLRIRCSRKGATPSILKIVQDYELGTNHDDEVNVPSLIANLKEKLGRFEYECEWKCMEKIKAFLASKVGPYYLGSYSAMLENALSPIKGMTTKNCKFVLKQIDAKNDIKYENEPFGKIVEGFFDSPYFESDTNVKWVLHPHHIGESNIKTLWEDLNAIHSKYEEDIASLSEDKKEKRIKVYQGDVCQTINTYCEEVGKEAKTPLVQLLRYLYSRKDDIAVDKIIDGITFLSKKHKVEKQKINPVIQKYPSFNFGNNSKLLGKIISPKDKLKHNLKCNRNQVDNYIWIEIKVLNTKTMRWEKHHYALSSTRFLEEVYYPATSENPPDALAARFRTKTNGYEGKPALSAEQIEQIRSAPVGLRKVKKRQMRLEAARQQNLLPRYTWGKDFNINICKRGNNFEVTLATKVKKKKEKNYKVVLGYDANIVRKNTYAAIEAHANGDGVIDYNDLPVKPIESGFVTVESQVRDKSYDQLSYNGVKLLYCKPHVESRRSFLEKYRNGTMKDNRGNNIQIDFMKDFEAIADDETSLYYFNMKYCKLLQSSIRNHSSQAKEYREEIFELLRDGKLSVLKLSSLSNLSFVMFKVAKSLIGTYFGHLLKKPKNSKSDVKAPPITDEDKQKADPEMFALRLALEEKRLNKVKSKKEVIANKIVAKALELRDKYGPVLIKGENISDTTKKGKKSSTNSFLMDWLARGVANKVKEMVMMHQGLEFVEVNPNFTSHQDPFVHKNPENTFRARYSRCTPSELTEKNRKEILSFLSDKPSKRPTNAYYNEGAMAFLATYGLKKNDVLGVSLEKFKQIMANILHQRSEDQLLFPSRGGMFYLATYKLDADATSVNWNGKQFWVCNADLVAAYNVGLVDIQKDFKKK

SEQ ID NO: 245 - protein, 1054 aa, synthetic construct
  REGION 1..1054: note = Cas12i2 polypeptide sequence
MSSAIKSYKSVLRPNERKNQLLKSTIQCLEDGSAFFFKMLQGLFGGITPEIVRFSTEQEKQQQDIALWCAVNWFRPVSQDSLTHTIASDNLVEKFEEYYGGTASDAIKQYFSASIGESYYWNDCRQQYYDLCRELGVEVSDLTHDLEILCREKCLAVATESNQNNSIISVLFGTGEKEDRSVKLRITKKILEAISNLKEIPKNVAPIQEIILNVAKATKETFRQVYAGNLGAPSTLEKFIAKDGQKEFDLKKLQTDLKKVIRGKSKERDWCCQEELRSYVEQNTIQYDLWAWGEMFNKAHTALKIKSTRNYNFAKQRLEQFKEIQSLNNLLVVKKLNDFFDSEFFSGEETYTICVHHLGGKDLSKLYKAWEDDPADPENAIVVLCDDLKNNFKKEPIRNILRYIFTIRQECSAQDILAAAKYNQQLDRYKSQKANPSVLGNQGFTWTNAVILPEKAQRNDRPNSLDLRIWLYLKLRHPDGRWKKHHIPFYDTRFFQEIYAAGNSPVDTCQFRTPRFGYHLPKLTDQTAIRVNKKHVKAAKTEARIRLAIQQGTLPVSNLKITEISATINSKGQVRIPVKFDVGRQKGTLQIGDRFCGYDQNQTASHAYSLWEVVKEGQYHKELGCFVRFISSGDIVSITENRGNQFDQLSYEGLAYPQYADWRKKASKFVSLWQITKKNKKKEIVTVEAKEKFDAICKYQPRLYKFNKEYAYLLRDIVRGKSLVELQQIRQEIFRFIEQDCGVTRLGSLSLSTLETVKAVKGIIYSYFSTALNASKNNPISDEQRKEFDPELFALLEKLELIRTRKKKQKVERIANSLIQTCLENNIKFIRGEGDLSTTNNATKKKANSRSMDWLARGVFNKIRQLAPMHNITLFGCGSLYTSHQDPLVHRNPDKAMKCRWAAIPVKDIGDWVLRKLSQNLRAKNIGTGEYYHQGVKEFLSHYELQDLEEELLKWRSDRKSNIPCWVLQNRLAEKLGNKEAVVYIPVRGGRIYFATHKVATGAVSIVFDQKQVWVCNADHVAAANIALTVKGIGEQSSDEENPDGSRIKLQLTS

SEQ ID NO: 246 - protein, 4 aa, synthetic construct
  REGION 1..4: note = synthetic peptide sequence
GGGS

SEQ ID NO: 247 - protein, 5 aa, synthetic construct
  REGION 1..5: note = synthetic peptide sequence
GGGGS

SEQ ID NO: 248 - protein, 5 aa, synthetic construct
  REGION 1..5: note = synthetic peptide sequence
EAAAK

SEQ ID NO: 249 - protein, 16 aa, synthetic construct
  REGION 1..16: note = synthetic peptide sequence
SGSETPGTSESATPES

SEQ ID NO: 250 - protein, 6 aa, synthetic construct
  REGION 1..6: note = linker peptide sequence
GGSGGS

SEQ ID NO: 251 - protein, 20 aa, synthetic construct
  REGION 1..20: note = synthetic peptide sequence
GSSGSETPGTSESATPESSG

SEQ ID NO: 252 - DNA, 18 bp, synthetic construct
  misc_feature 1..18: note = synthetic oligonucleotide sequence
  source 1..18: mol_type = other DNA
ggaggctctggaggaagc

SEQ ID NO: 253 - DNA, 60 bp, synthetic construct
  misc_feature 1..60: note = synthetic oligonucleotide sequence
  source 1..60: mol_type = other DNA
ggctcttctggatctgaaacacctggcacaagcgagagcgccacccctgagagctctggc

SEQ ID NO: 254 - protein, 1129 aa, Alicyclobacillus acidiphilus
  REGION 1..1129: note = MISC_FEATURE - AacCas12b polypeptide sequence
MAVKSMKVKLRLDNMPEIRAGLWKLHTEVNAGVRYYTEWLSLLRQENLYRRSPNGDGEQECYKTAEECKAELLERLRARQVENGHCGPAGSDDELLQLARQLYELLVPQAIGAKGDAQQIARKFLSPLADKDAVGGLGIAKAGNKPRWVRMREAGEPGWEEEKAKAEARKSTDRTADVLRALADFGLKPLMRVYTDSDMSSVQWKPLRKGQAVRTWDRDMFQQAIERMMSWESWNQRVGEAYAKLVEQKSRFEQKNFVGQEHLVQLVNQLQQDMKEASHGLESKEQTAHYLTGRALRGSDKVFEKWEKLDPDAPFDLYDTEIKNVQRRNTRRFGSHDLFAKLAEPKYQALWREDASFLTRYAVYNSIVRKLNHAKMFATFTLPDATAHPIWTRFDKLGGNLHQYTFLFNEFGEGRHAIRFQKLLTVEDGVAKEVDDVTVPISMSAQLDDLLPRDPHELVALYFQDYGAEQHLAGEFGGAKIQYRRDQLNHLHARRGARDVYLNLSVRVQSQSEARGERRPPYAAVFRLVGDNHRAFVHFDKLSDYLAEHPDDGKLGSEGLLSGLRVMSVDLGLRTSASISVFRVARKDELKPNSEGRVPFCFPIEGNENLVAVHERSQLLKLPGETESKDLRAIREERQRTLRQLRTQLAYLRLLVRCGSEDVGRRERSWAKLIEQPMDANQMTPDWREAFEDELQKLKSLYGICGDREWTEAVYESVRRVWRHMGKQVRDWRKDVRSGERPKIRGYQKDVVGGNSIEQIEYLERQYKFLKSWSFFGKVSGQVIRAEKGSRFAITLREHIDHAKEDRLKKLADRIIMEALGYVYALDDERGKGKWVAKYPPCQLILLEELSEYQFNNDRPPSENNQLMQWSHRGVFQELLNQAQVHDLLVGTMYAAFSSRFDARTGAPGIRCRRVPARCAREQNPEPFPWWLNKFVAEHKLDGCPLRADDLIPTGEGEFFVSPFSAEEGDFHQIHADLNAAQNLQRRLWSDFDISQIRLRCDWGEVDGEPVLIPRTTGKRTADSYGNKVFYTKTGVTYYERERGKKRRKVFAQEELSEEEAELLVEADEAREKSVVLMRDPSGIINRGDWTRQKEFWSMVNQRIEGYLVKQIRSRVRLQESACENTGDI

SEQ ID NO: 255 - protein, 1140 aa, Bacillus hisashii
  REGION 1..1140: note = MISC_FEATURE - BhCas12b polypeptide sequence
MAPKKKRKVGIHGVPAAATRSFILKIEPNEEVKKGLWKTHEVLNHGIAYYMNILKLIRQEAIYEHHEQDPKNPKKVSKAEIQAELWDFVLKMQKCNSFTHEVDKDEVFNILRELYEELVPSSVEKKGEANQLSNKFLYPLVDPNSQSGKGTASSGRKPRWYNLKIAGDPSWEEEKKKWEEDKKKDPLAKILGKLAEYGLIPLFIPYTDSNEPIVKEIKWMEKSRNQSVRRLDKDMFIQALERFLSWESWNLKVKEEYEKVEKEYKTLEERIKEDIQALKALEQYEKERQEQLLRDTLNTNEYRLSKRGLRGWREIIQKWLKMDENEPSEKYLEVFKDYQRKHPREAGDYSVYEFLSKKENHFIWRNHPEYPYLYATFCEIDKKKKDAKQQATFTLADPINHPLWVRFEERSGSNLNKYRILTEQLHTEKLKKKLTVQLDRLIYPTESGGWEEKGKVDIVLLPSRQFYNQIFLDIEEKGKHAFTYKDESIKFPLKGTLGGARVQFDRDHLRRYPHKVESGNVGRIYFNMTVNIEPTESPVSKSLKIHRDDFPKVVNFKPKELTEWIKDSKGKKLKSGIESLEIGLRVMSIDLGQRQAAAASIFEVVDQKPDIEGKLFFPIKGTELYAVHRASFNIKLPGETLVKSREVLRKAREDNLKLMNQKLNFLRNVLHFQQFEDITEREKRVTKWISRQENSDVPLVYQDELIQIRELMYKPYKDWVAFLKQLHKRLEVEIGKEVKHWRKSLSDGRKGLYGISLKNIDEIDRTRKFLLRWSLRPTEPGEVRRLEPGQRFAIDQLNHLNALKEDRLKKMANTIIMHALGYCYDVRKKKWQAKNPACQIILFEDLSNYNPYEERSRFENSKLMKWSRREIPRQVALQGEIYGLQVGEVGAQFSSRFHAKTGSPGIRCSVVTKEKLQDNRFFKNLQREGRLTLDKIAVLKEGDLYPDKGGEKFISLSKDRKCVTTHADINAAQNLQKRFWTRTHGFYKVYCKAYQVDGQTVYIPESKDQKQKIIEEFGEGYFILKDGVYEWVNAGKLKIKKGSSKQSSSELVDSDILKDSFDLASELKGEKLMLYRDPSGNVFPSDKWMAAGVFFGKLERILISKLTNQYSISTIEDDSSKQSMKRPAATKKAGQAKKKK

SEQ ID NO: 256 - protein, 1108 aa, Bacillus thermoamylovorans
  REGION 1..1108: note = MISC_FEATURE - BTCas12b polypeptide sequence
MATRSFILKIEPNEEVKKGLWKTHEVLNHGIAYYMNILKLIRQEAIYEHHEQDPKNPKKVSKAEIQAELWDFVLKMQKCNSFTHEVDKDVVFNILRELYEELVPSSVEKKGEANQLSNKFLYPLVDPNSQSGKGTASSGRKPRWYNLKIAGDPSWEEEKKKWEEDKKKDPLAKILGKLAEYGLIPLFIPFTDSNEPIVKEIKWMEKSRNQSVRRLDKDMFIQALERFLSWESWNLKVKEEYEKVEKEHKTLEERIKEDIQAFKSLEQYEKERQEQLLRDTLNTNEYRLSKRGLRGWREIIQKWLKMDENEPSEKYLEVFKDYQRKHPREAGDYSVYEFLSKKENHFIWRNHPEYPYLYATFCEIDKKKKDAKQQATFTLADPINHPLWVRFEERSGSNLNKYRILTEQLHTEKLKKKLTVQLDRLIYPTESGGWEEKGKVDIVLLPSRQFYNQIFLDIEEKGKHAFTYKDESIKFPLKGTLGGARVQFDRDHLRRYPHKVESGNVGRIYFNMTVNIEPTESPVSKSLKIHRDDFPKFVNFKPKELTEWIKDSKGKKLKSGIESLEIGLRVMSIDLGQRQAAAASIFEVVDQKPDIEGKLFFPIKGTELYAVHRASFNIKLPGETLVKSREVLRKAREDNLKLMNQKLNFLRNVLHFQQFEDITEREKRVTKWISRQENSDVPLVYQDELIQIRELMYKPYKDWVAFLKQLHKRLEVEIGKEVKHWRKSLSDGRKGLYGISLKNIDEIDRTRKFLLRWSLRPTEPGEVRRLEPGQRFAIDQLNHLNALKEDRLKKMANTIIMHALGYCYDVRKKKWQAKNPACQIILFEDLSNYNPYEERSRFENSKLMKWSRREIPRQVALQGEIYGLQVGEVGAQFSSRFHAKTGSPGIRCSVVTKEKLQDNRFFKNLQREGRLTLDKIAVLKEGDLYPDKGGEKFISLSKDRKLVTTHADINAAQNLQKRFWTRTHGFYKVYCKAYQVDGQTVYIPESKDQKQKIIEEFGEGYFILKDGVYEWGNAGKLKIKKGSSKQSSSELVDSDILKDSFDLASELKGEKLMLYRDPSGNVFPSDKWMAAGVFFGKLERILISKLTNQYSISTIEDDSSKQSM

SEQ ID NO: 257 - protein, 1112 aa, Bacillus sp.
  REGION 1..1112: note = MISC_FEATURE - BvCas12b (Bacillus sp. V3-13) polypeptide sequence
MAIRSIKLKMKTNSGTDSIYLRKALWRTHQLINEGIAYYMNLLTLYRQEAIGDKTKEAYQAELINIIRNQQRNNGSSEEHGSDQEILALLRQLYELIIPSSIGESGDANQLGNKFLYPLVDPNSQSGKGTSNAGRKPRWKRLKEEGNPDWELEKKKDEERKAKDPTVKIFDNLNKYGLLPLFPLFTNIQKDIEWLPLGKRQSVRKWDKDMFIQAIERLLSWESWNRRVADEYKQLKEKTESYYKEHLTGGEEWIEKIRKFEKERNMELEKNAFAPNDGYFITSRQIRGWDRVYEKWSKLPESASPEELWKVVAEQQNKMSEGFGDPKVFSFLANRENRDIWRGHSERIYHIAAYNGLQKKLSRTKEQATFTLPDAIEHPLWIRYESPGGTNLNLFKLEEKQKKNYYVTLSKIIWPSEEKWIEKENIEIPLAPSIQFNRQIKLKQHVKGKQEISFSDYSSRISLDGVLGGSRIQFNRKYIKNHKELLGEGDIGPVFFNLVVDVAPLQETRNGRLQSPIGKALKVISSDFSKVIDYKPKELMDWMNTGSASNSFGVASLLEGMRVMSIDMGQRTSASVSIFEVVKELPKDQEQKLFYSINDTELFAIHKRSFLLNLPGEVVTKNNKQQRQERRKKRQFVRSQIRMLANVLRLETKKTPDERKKAIHKLMEIVQSYDSWTASQKEVWEKELNLLTNMAAFNDEIWKESLVELHHRIEPYVGQIVSKWRKGLSEGRKNLAGISMWNIDELEDTRRLLISWSKRSRTPGEANRIETDEPFGSSLLQHIQNVKDDRLKQMANLIIMTALGFKYDKEEKDRYKRWKETYPACQIILFENLNRYLFNLDRSRRENSRLMKWAHRSIPRTVSMQGEMFGLQVGDVRSEYSSRFHAKTGAPGIRCHALTEEDLKAGSNTLKRLIEDGFINESELAYLKKGDIIPSQGGELFVTLSKRYKKDSDNNELTVIHADINAAQNLQKRFWQQNSEVYRVPCQLARMGEDKLYIPKSQTETIKKYFGKGSFVKNNTEQEVYKWEKSEKMKIKTDTTFDLQDLDGFEDISKTIELAQEQQKKYLTMFRDPSGYFFNNETWRPQKEYWSIVNNIIKSCLKKKILSNKVEL

SEQ ID NO: 258 - DNA, 47 bp, synthetic construct
  misc_feature 1..47: note = 5'UTR oligonucleotide sequence
  source 1..47: mol_type = other DNA
gggaaataagagagaaaagaagagtaagaagaaatataagagccacc

SEQ ID NO: 259 - DNA, 101 bp, synthetic construct
  misc_feature 1..101: note = 3'UTR (TriLink standard UTR)polynucleotide sequence
  source 1..101: mol_type = other DNA
gctggagcctcggtggccatgcttcttgccccttgggcctccccccagcccctcctccccttcctgcacccgtacccccgtggtctttgaataaagtctga

SEQ ID NO: 260 - DNA, 3420 bp, Bacillus hisashii
  misc_feature 1..3420: note = bhCas12b (V4) polynucleotide sequence
  source 1..3420: mol_type = genomic DNA
atggccccaaagaagaagcggaaggtcggtatccacggagtcccagcagccgccaccagatccttcatcctgaagatcgagcccaacgaggaagtgaagaaaggcctctggaaaacccacgaggtgctgaaccacggaatcgcctactacatgaatatcctgaagctgatccggcaagaggccatctacgagcaccacgagcaggaccccaagaatcccaagaaggtgtccaaggccgagatccaggccgagctgtgggatttcgtgctgaagatgcagaagtgcaacagcttcacacacgaggtggacaaggacgaggtgttcaacatcctgagagagctgtacgaggaactggtgcccagcagcgtggaaaagaagggcgaagccaaccagctgagcaacaagtttctgtaccctctggtggaccccaacagccagtctggaaagggaacagccagcagcggcagaaagcccagatggtacaacctgaagattgccggcgatccctcctgggaagaagagaagaagaagtgggaagaagataagaaaaaggacccgctggccaagatcctgggcaagctggctgagtacggactgatccctctgttcatcccctacaccgacagcaacgagcccatcgtgaaagaaatcaagtggatggaaaagtcccggaaccagagcgtgcggcggctggataaggacatgttcattcaggccctggaacggttcctgagctgggagagctggaacctgaaagtgaaagaggaatacgagaaggtcgagaaagagtacaagaccctggaagagaggatcaaagaggacatccaggctctgaaggctctggaacagtatgagaaagagcggcaagaacagctgctgcgggacaccctgaacaccaacgagtaccggctgagcaagagaggccttagaggctggcgggaaatcatccagaaatggctgaaaatggacgagaacgagccctccgagaagtacctggaagtgttcaaggactaccagcggaagcaccctagagaggccggcgattacagcgtgtacgagttcctgtccaagaaagagaaccacttcatctggcggaatcaccctgagtacccctacctgtacgccaccttctgcgagatcgacaagaaaaagaaggacgccaagcagcaggccaccttcacactggccgatcctatcaatcaccctctgtgggtccgattcgaggaaagaagcggcagcaacctgaacaagtacagaatcctgaccgagcagctgcacaccgagaagctgaagaaaaagctgacagtgcagctggaccggctgatctaccctacagaatctggcggctgggaagagaagggcaaagtggacattgtgctgctgcccagccggcagttctacaaccagatcttcctggacatcgaggaaaagggcaagcacgccttcacctacaaggatgagagcatcaagttccctctgaagggcacactcggcggagccagagtgcagttcgacagagatcacctgagaagataccctcacaaggtggaaagcggcaacgtgggcagaatctacttcaacatgaccgtgaacatcgagcctacagagtccccagtgtccaagtctctgaagatccaccgggacgacttccccaaggtggtcaacttcaagcccaaagaactgaccgagtggatcaaggacagcaagggcaagaaactgaagtccggcatcgagtccctggaaatcggcctgagagtgatgagcatcgacctgggacagagacaggccgctgccgcctctattttcgaggtggtggatcagaagcccgacatcgaaggcaagctgtttttcccaatcaagggcaccgagctgtatgccgtgcacagagccagcttcaacatcaagctgcccggcgagacactggtcaagagcagagaagtgctgcggaaggccagagaggacaatctgaaactgatgaaccagaagctcaacttcctgcggaacgtgctgcacttccagcagttcgaggacatcaccgagagagagaagcgggtcaccaagtggatcagcagacaagagaacagcgacgtgcccctggtgtaccaggatgagctgatccagatccgcgagctgatgtacaagccttacaaggactgggtcgccttcctgaagcagctccacaagagactggaagtcgagatcggcaaagaagtgaagcactggcggaagtccctgagcgacggaagaaagggcctgtacggcatctccctgaagaacatcgacgagatcgatcggacccggaagttcctgctgagatggtccctgaggcctaccgaacctggcgaagtgcgtagactggaacccggccagagattcgccatcgaccagctgaatcacctgaacgccctgaaagaagatcggctgaagaagatggccaacaccatcatcatgcacgccctgggctactgctacgacgtgcggaagaagaaatggcaggctaagaaccccgcctgccagatcatcctgttcgaggatctgagcaactacaacccctacgaggaaaggtcccgcttcgagaacagcaagctcatgaagtggtccagacgcgagatccccagacaggttgcactgcagggcgagatctatggcctgcaagtgggagaagtgggcgctcagttcagcagcagattccacgccaagacaggcagccctggcatcagatgtagcgtcgtgaccaaagagaagctgcaggacaatcggttcttcaagaatctgcagagagagggcagactgaccctggacaaaatcgccgtgctgaaagagggcgatctgtacccagacaaaggcggcgagaagttcatcagcctgagcaaggatcggaagtgcgtgaccacacacgccgacatcaacgccgctcagaacctgcagaagcggttctggacaagaacccacggcttctacaaggtgtactgcaaggcctaccaggtggacggccagaccgtgtacatccctgagagcaaggaccagaagcagaagatcatcgaagagttcggcgagggctacttcattctgaaggacggggtgtacgaatgggtcaacgccggcaagctgaaaatcaagaagggcagctccaagcagagcagcagcgagctggtggatagcgacatcctgaaagacagcttcgacctggcctccgagctgaaaggcgaaaagctgatgctgtacagggaccccagcggcaatgtgttccccagcgacaaatggatggccgctggcgtgttcttcggaaagctggaacgcatcctgatcagcaagctgaccaaccagtactccatcagcaccatcgaggacgacagcagcaagcagtctatgaaaaggccggcggccacgaaaaaggccggccaggcaaaaaagaaaaag

SEQ ID NO: 261 - protein, 17 aa, synthetic construct
  REGION 1..17: note = synthetic peptide sequence
MAPKKKRKVGIHGVPAA

SEQ ID NO: 262 - DNA, 51 bp, synthetic construct
  misc_feature 1..51: note = synthetic oligonucleotide sequence
  source 1..51: mol_type = other DNA
atggccccaaagaagaagcggaaggtcggtatccacggagtcccagcagcc

SEQ ID NO: 263 - protein, 1554 aa, synthetic construct
  REGION 1..1554: note = 101 Cas9 TadAins 1015 polypeptide sequence
MDKKYSIGLAIGTNSVGWAVITDEYKVPSKKFKVLGNTDRHSIKKNLIGALLFDSGETAEATRLKRTARRRYTRRKNRICYLQEIFSNEMAKVDDSFFHRLEESFLVEEDKKHERHPIFGNIVDEVAYHEKYPTIYHLRKKLVDSTDKADLRLIYLALAHMIKFRGHFLIEGDLNPDNSDVDKLFIQLVQTYNQLFEENPINASGVDAKAILSARLSKSRRLENLIAQLPGEKKNGLFGNLIALSLGLTPNFKSNFDLAEDAKLQLSKDTYDDDLDNLLAQIGDQYADLFLAAKNLSDAILLSDILRVNTEITKAPLSASMIKRYDEHHQDLTLLKALVRQQLPEKYKEIFFDQSKNGYAGYIDGGASQEEFYKFIKPILEKMDGTEELLVKLNREDLLRKQRTFDNGSIPHQIHLGELHAILRRQEDFYPFLKDNREKIEKILTFRIPYYVGPLARGNSRFAWMTRKSEETITPWNFEEVVDKGASAQSFIERMTNFDKNLPNEKVLPKHSLLYEYFTVYNELTKVKYVTEGMRKPAFLSGEQKKAIVDLLFKTNRKVTVKQLKEDYFKKIECFDSVEISGVEDRFNASLGTYHDLLKIIKDKDFLDNEENEDILEDIVLTLTLFEDREMIEERLKTYAHLFDDKVMKQLKRRRYTGWGRLSRKLINGIRDKQSGKTILDFLKSDGFANRNFMQLIHDDSLTFKEDIQKAQVSGQGDSLHEHIANLAGSPAIKKGILQTVKVVDELVKVMGRHKPENIVIEMARENQTTQKGQKNSRERMKRIEEGIKELGSQILKEHPVENTQLQNEKLYLYYLQNGRDMYVDQELDINRLSDYDVDHIVPQSFLKDDSIDNKVLTRSDKNRGKSDNVPSEEVVKKMKNYWRQLLNAKLITQRKFDNLTKAERGGLSELDKAGFIKRQLVETRQITKHVAQILDSRMNTKYDENDKLIREVKVITLKSKLVSDFRKDFQFYKVREINNYHHAHDAYLNAVVGTALIKKYPKLESEFVYGDYKVGSSGSETPGTSESATPESSGSEVEFSHEYWMRHALTLAKRARDEREVPVGAVLVLNNRVIGEGWNRAIGLHDPTAHAEIMALRQGGLVMQNYRLIDATLYVTFEPCVMCAGAMIHSRIGRVVFGVRNAKTGAAGSLMDVLHYPGMNHRVEITEGILADECAALLCYFFRMPRQVFNAQKKAQSSTDYDVRKMIAKSEQEIGKATAKYFFYSNIMNFFKTEITLANGEIRKRPLIETNGETGEIVWDKGRDFATVRKVLSMPQVNIVKKTEVQTGGFSKESILPKRNSDKLIARKKDWDPKKYGGFDSPTVAYSVLVVAKVEKGKSKKLKSVKELLGITIMERSSFEKNPIDFLEAKGYKEVKKDLIIKLPKYSLFELENGRKRMLASAGELQKGNELALPSKYVNFLYLASHYEKLKGSPEDNEQKQLFVEQHKHYLDEIIEQISEFSKRVILADANLDKVLSAYNKHRDKPIREQAENIIHLFTLTNLGAPAAFKYFDTTIDRKRYTSTKEVLDATLIHQSITGLYETRIDLSQLGGD

SEQ ID NO: 264 - protein, 1554 aa, synthetic construct
  REGION 1..1554: note = 102 Cas9 TadAins 1022 polypeptide sequence
MDKKYSIGLAIGTNSVGWAVITDEYKVPSKKFKVLGNTDRHSIKKNLIGALLFDSGETAEATRLKRTARRRYTRRKNRICYLQEIFSNEMAKVDDSFFHRLEESFLVEEDKKHERHPIFGNIVDEVAYHEKYPTIYHLRKKLVDSTDKADLRLIYLALAHMIKFRGHFLIEGDLNPDNSDVDKLFIQLVQTYNQLFEENPINASGVDAKAILSARLSKSRRLENLIAQLPGEKKNGLFGNLIALSLGLTPNFKSNFDLAEDAKLQLSKDTYDDDLDNLLAQIGDQYADLFLAAKNLSDAILLSDILRVNTEITKAPLSASMIKRYDEHHQDLTLLKALVRQQLPEKYKEIFFDQSKNGYAGYIDGGASQEEFYKFIKPILEKMDGTEELLVKLNREDLLRKQRTFDNGSIPHQIHLGELHAILRRQEDFYPFLKDNREKIEKILTFRIPYYVGPLARGNSRFAWMTRKSEETITPWNFEEVVDKGASAQSFIERMTNFDKNLPNEKVLPKHSLLYEYFTVYNELTKVKYVTEGMRKPAFLSGEQKKAIVDLLFKTNRKVTVKQLKEDYFKKIECFDSVEISGVEDRFNASLGTYHDLLKIIKDKDFLDNEENEDILEDIVLTLTLFEDREMIEERLKTYAHLFDDKVMKQLKRRRYTGWGRLSRKLINGIRDKQSGKTILDFLKSDGFANRNFMQLIHDDSLTFKEDIQKAQVSGQGDSLHEHIANLAGSPAIKKGILQTVKVVDELVKVMGRHKPENIVIEMARENQTTQKGQKNSRERMKRIEEGIKELGSQILKEHPVENTQLQNEKLYLYYLQNGRDMYVDQELDINRLSDYDVDHIVPQSFLKDDSIDNKVLTRSDKNRGKSDNVPSEEVVKKMKNYWRQLLNAKLITQRKFDNLTKAERGGLSELDKAGFIKRQLVETRQITKHVAQILDSRMNTKYDENDKLIREVKVITLKSKLVSDFRKDFQFYKVREINNYHHAHDAYLNAVVGTALIKKYPKLESEFVYGDYKVYDVRKMIGSSGSETPGTSESATPESSGSEVEFSHEYWMRHALTLAKRARDEREVPVGAVLVLNNRVIGEGWNRAIGLHDPTAHAEIMALRQGGLVMQNYRLIDATLYVTFEPCVMCAGAMIHSRIGRVVFGVRNAKTGAAGSLMDVLHYPGMNHRVEITEGILADECAALLCYFFRMPRQVFNAQKKAQSSTDAKSEQEIGKATAKYFFYSNIMNFFKTEITLANGEIRKRPLIETNGETGEIVWDKGRDFATVRKVLSMPQVNIVKKTEVQTGGFSKESILPKRNSDKLIARKKDWDPKKYGGFDSPTVAYSVLVVAKVEKGKSKKLKSVKELLGITIMERSSFEKNPIDFLEAKGYKEVKKDLIIKLPKYSLFELENGRKRMLASAGELQKGNELALPSKYVNFLYLASHYEKLKGSPEDNEQKQLFVEQHKHYLDEIIEQISEFSKRVILADANLDKVLSAYNKHRDKPIREQAENIIHLFTLTNLGAPAAFKYFDTTIDRKRYTSTKEVLDATLIHQSITGLYETRIDLSQLGGD

SEQ ID NO: 265 - protein, 1554 aa, synthetic construct
  REGION 1..1554: note = 103 Cas9 TadAins 1029 polypeptide sequence
MDKKYSIGLAIGTNSVGWAVITDEYKVPSKKFKVLGNTDRHSIKKNLIGALLFDSGETAEATRLKRTARRRYTRRKNRICYLQEIFSNEMAKVDDSFFHRLEESFLVEEDKKHERHPIFGNIVDEVAYHEKYPTIYHLRKKLVDSTDKADLRLIYLALAHMIKFRGHFLIEGDLNPDNSDVDKLFIQLVQTYNQLFEENPINASGVDAKAILSARLSKSRRLENLIAQLPGEKKNGLFGNLIALSLGLTPNFKSNFDLAEDAKLQLSKDTYDDDLDNLLAQIGDQYADLFLAAKNLSDAILLSDILRVNTEITKAPLSASMIKRYDEHHQDLTLLKALVRQQLPEKYKEIFFDQSKNGYAGYIDGGASQEEFYKFIKPILEKMDGTEELLVKLNREDLLRKQRTFDNGSIPHQIHLGELHAILRRQEDFYPFLKDNREKIEKILTFRIPYYVGPLARGNSRFAWMTRKSEETITPWNFEEVVDKGASAQSFIERMTNFDKNLPNEKVLPKHSLLYEYFTVYNELTKVKYVTEGMRKPAFLSGEQKKAIVDLLFKTNRKVTVKQLKEDYFKKIECFDSVEISGVEDRFNASLGTYHDLLKIIKDKDFLDNEENEDILEDIVLTLTLFEDREMIEERLKTYAHLFDDKVMKQLKRRRYTGWGRLSRKLINGIRDKQSGKTILDFLKSDGFANRNFMQLIHDDSLTFKEDIQKAQVSGQGDSLHEHIANLAGSPAIKKGILQTVKVVDELVKVMGRHKPENIVIEMARENQTTQKGQKNSRERMKRIEEGIKELGSQILKEHPVENTQLQNEKLYLYYLQNGRDMYVDQELDINRLSDYDVDHIVPQSFLKDDSIDNKVLTRSDKNRGKSDNVPSEEVVKKMKNYWRQLLNAKLITQRKFDNLTKAERGGLSELDKAGFIKRQLVETRQITKHVAQILDSRMNTKYDENDKLIREVKVITLKSKLVSDFRKDFQFYKVREINNYHHAHDAYLNAVVGTALIKKYPKLESEFVYGDYKVYDVRKMIAKSEQEIGSSGSETPGTSESATPESSGSEVEFSHEYWMRHALTLAKRARDEREVPVGAVLVLNNRVIGEGWNRAIGLHDPTAHAEIMALRQGGLVMQNYRLIDATLYVTFEPCVMCAGAMIHSRIGRVVFGVRNAKTGAAGSLMDVLHYPGMNHRVEITEGILADECAALLCYFFRMPRQVFNAQKKAQSSTDGKATAKYFFYSNIMNFFKTEITLANGEIRKRPLIETNGETGEIVWDKGRDFATVRKVLSMPQVNIVKKTEVQTGGFSKESILPKRNSDKLIARKKDWDPKKYGGFDSPTVAYSVLVVAKVEKGKSKKLKSVKELLGITIMERSSFEKNPIDFLEAKGYKEVKKDLIIKLPKYSLFELENGRKRMLASAGELQKGNELALPSKYVNFLYLASHYEKLKGSPEDNEQKQLFVEQHKHYLDEIIEQISEFSKRVILADANLDKVLSAYNKHRDKPIREQAENIIHLFTLTNLGAPAAFKYFDTTIDRKRYTSTKEVLDATLIHQSITGLYETRIDLSQLGGD

SEQ ID NO: 266 - protein, 1554 aa, synthetic construct
  REGION 1..1554: note = 103 Cas9 TadAins 1040 polypeptide sequence
MDKKYSIGLAIGTNSVGWAVITDEYKVPSKKFKVLGNTDRHSIKKNLIGALLFDSGETAEATRLKRTARRRYTRRKNRICYLQEIFSNEMAKVDDSFFHRLEESFLVEEDKKHERHPIFGNIVDEVAYHEKYPTIYHLRKKLVDSTDKADLRLIYLALAHMIKFRGHFLIEGDLNPDNSDVDKLFIQLVQTYNQLFEENPINASGVDAKAILSARLSKSRRLENLIAQLPGEKKNGLFGNLIALSLGLTPNFKSNFDLAEDAKLQLSKDTYDDDLDNLLAQIGDQYADLFLAAKNLSDAILLSDILRVNTEITKAPLSASMIKRYDEHHQDLTLLKALVRQQLPEKYKEIFFDQSKNGYAGYIDGGASQEEFYKFIKPILEKMDGTEELLVKLNREDLLRKQRTFDNGSIPHQIHLGELHAILRRQEDFYPFLKDNREKIEKILTFRIPYYVGPLARGNSRFAWMTRKSEETITPWNFEEVVDKGASAQSFIERMTNFDKNLPNEKVLPKHSLLYEYFTVYNELTKVKYVTEGMRKPAFLSGEQKKAIVDLLFKTNRKVTVKQLKEDYFKKIECFDSVEISGVEDRFNASLGTYHDLLKIIKDKDFLDNEENEDILEDIVLTLTLFEDREMIEERLKTYAHLFDDKVMKQLKRRRYTGWGRLSRKLINGIRDKQSGKTILDFLKSDGFANRNFMQLIHDDSLTFKEDIQKAQVSGQGDSLHEHIANLAGSPAIKKGILQTVKVVDELVKVMGRHKPENIVIEMARENQTTQKGQKNSRERMKRIEEGIKELGSQILKEHPVENTQLQNEKLYLYYLQNGRDMYVDQELDINRLSDYDVDHIVPQSFLKDDSIDNKVLTRSDKNRGKSDNVPSEEVVKKMKNYWRQLLNAKLITQRKFDNLTKAERGGLSELDKAGFIKRQLVETRQITKHVAQILDSRMNTKYDENDKLIREVKVITLKSKLVSDFRKDFQFYKVREINNYHHAHDAYLNAVVGTALIKKYPKLESEFVYGDYKVYDVRKMIAKSEQEIGKATAKYFFYSGSSGSETPGTSESATPESSGSEVEFSHEYWMRHALTLAKRARDEREVPVGAVLVLNNRVIGEGWNRAIGLHDPTAHAEIMALRQGGLVMQNYRLIDATLYVTFEPCVMCAGAMIHSRIGRVVFGVRNAKTGAAGSLMDVLHYPGMNHRVEITEGILADECAALLCYFFRMPRQVFNAQKKAQSSTDNIMNFFKTEITLANGEIRKRPLIETNGETGEIVWDKGRDFATVRKVLSMPQVNIVKKTEVQTGGFSKESILPKRNSDKLIARKKDWDPKKYGGFDSPTVAYSVLVVAKVEKGKSKKLKSVKELLGITIMERSSFEKNPIDFLEAKGYKEVKKDLIIKLPKYSLFELENGRKRMLASAGELQKGNELALPSKYVNFLYLASHYEKLKGSPEDNEQKQLFVEQHKHYLDEIIEQISEFSKRVILADANLDKVLSAYNKHRDKPIREQAENIIHLFTLTNLGAPAAFKYFDTTIDRKRYTSTKEVLDATLIHQSITGLYETRIDLSQLGGD

SEQ ID NO: 267 - protein, 1554 aa, synthetic construct
  REGION 1..1554: note = 105 Cas9 TadAins 1068 polypeptide sequence
MDKKYSIGLAIGTNSVGWAVITDEYKVPSKKFKVLGNTDRHSIKKNLIGALLFDSGETAEATRLKRTARRRYTRRKNRICYLQEIFSNEMAKVDDSFFHRLEESFLVEEDKKHERHPIFGNIVDEVAYHEKYPTIYHLRKKLVDSTDKADLRLIYLALAHMIKFRGHFLIEGDLNPDNSDVDKLFIQLVQTYNQLFEENPINASGVDAKAILSARLSKSRRLENLIAQLPGEKKNGLFGNLIALSLGLTPNFKSNFDLAEDAKLQLSKDTYDDDLDNLLAQIGDQYADLFLAAKNLSDAILLSDILRVNTEITKAPLSASMIKRYDEHHQDLTLLKALVRQQLPEKYKEIFFDQSKNGYAGYIDGGASQEEFYKFIKPILEKMDGTEELLVKLNREDLLRKQRTFDNGSIPHQIHLGELHAILRRQEDFYPFLKDNREKIEKILTFRIPYYVGPLARGNSRFAWMTRKSEETITPWNFEEVVDKGASAQSFIERMTNFDKNLPNEKVLPKHSLLYEYFTVYNELTKVKYVTEGMRKPAFLSGEQKKAIVDLLFKTNRKVTVKQLKEDYFKKIECFDSVEISGVEDRFNASLGTYHDLLKIIKDKDFLDNEENEDILEDIVLTLTLFEDREMIEERLKTYAHLFDDKVMKQLKRRRYTGWGRLSRKLINGIRDKQSGKTILDFLKSDGFANRNFMQLIHDDSLTFKEDIQKAQVSGQGDSLHEHIANLAGSPAIKKGILQTVKVVDELVKVMGRHKPENIVIEMARENQTTQKGQKNSRERMKRIEEGIKELGSQILKEHPVENTQLQNEKLYLYYLQNGRDMYVDQELDINRLSDYDVDHIVPQSFLKDDSIDNKVLTRSDKNRGKSDNVPSEEVVKKMKNYWRQLLNAKLITQRKFDNLTKAERGGLSELDKAGFIKRQLVETRQITKHVAQILDSRMNTKYDENDKLIREVKVITLKSKLVSDFRKDFQFYKVREINNYHHAHDAYLNAVVGTALIKKYPKLESEFVYGDYKVYDVRKMIAKSEQEIGKATAKYFFYSNIMNFFKTEITLANGEIRKRPLIETNGEGSSGSETPGTSESATPESSGSEVEFSHEYWMRHALTLAKRARDEREVPVGAVLVLNNRVIGEGWNRAIGLHDPTAHAEIMALRQGGLVMQNYRLIDATLYVTFEPCVMCAGAMIHSRIGRVVFGVRNAKTGAAGSLMDVLHYPGMNHRVEITEGILADECAALLCYFFRMPRQVFNAQKKAQSSTDTGEIVWDKGRDFATVRKVLSMPQVNIVKKTEVQTGGFSKESILPKRNSDKLIARKKDWDPKKYGGFDSPTVAYSVLVVAKVEKGKSKKLKSVKELLGITIMERSSFEKNPIDFLEAKGYKEVKKDLIIKLPKYSLFELENGRKRMLASAGELQKGNELALPSKYVNFLYLASHYEKLKGSPEDNEQKQLFVEQHKHYLDEIIEQISEFSKRVILADANLDKVLSAYNKHRDKPIREQAENIIHLFTLTNLGAPAAFKYFDTTIDRKRYTSTKEVLDATLIHQSITGLYETRIDLSQLGGD

SEQ ID NO: 268 - protein, 1554 aa, synthetic construct
  REGION 1..1554: note = 106 Cas9 TadAins 1247 polypeptide sequence
MDKKYSIGLAIGTNSVGWAVITDEYKVPSKKFKVLGNTDRHSIKKNLIGALLFDSGETAEATRLKRTARRRYTRRKNRICYLQEIFSNEMAKVDDSFFHRLEESFLVEEDKKHERHPIFGNIVDEVAYHEKYPTIYHLRKKLVDSTDKADLRLIYLALAHMIKFRGHFLIEGDLNPDNSDVDKLFIQLVQTYNQLFEENPINASGVDAKAILSARLSKSRRLENLIAQLPGEKKNGLFGNLIALSLGLTPNFKSNFDLAEDAKLQLSKDTYDDDLDNLLAQIGDQYADLFLAAKNLSDAILLSDILRVNTEITKAPLSASMIKRYDEHHQDLTLLKALVRQQLPEKYKEIFFDQSKNGYAGYIDGGASQEEFYKFIKPILEKMDGTEELLVKLNREDLLRKQRTFDNGSIPHQIHLGELHAILRRQEDFYPFLKDNREKIEKILTFRIPYYVGPLARGNSRFAWMTRKSEETITPWNFEEVVDKGASAQSFIERMTNFDKNLPNEKVLPKHSLLYEYFTVYNELTKVKYVTEGMRKPAFLSGEQKKAIVDLLFKTNRKVTVKQLKEDYFKKIECFDSVEISGVEDRFNASLGTYHDLLKIIKDKDFLDNEENEDILEDIVLTLTLFEDREMIEERLKTYAHLFDDKVMKQLKRRRYTGWGRLSRKLINGIRDKQSGKTILDFLKSDGFANRNFMQLIHDDSLTFKEDIQKAQVSGQGDSLHEHIANLAGSPAIKKGILQTVKVVDELVKVMGRHKPENIVIEMARENQTTQKGQKNSRERMKRIEEGIKELGSQILKEHPVENTQLQNEKLYLYYLQNGRDMYVDQELDINRLSDYDVDHIVPQSFLKDDSIDNKVLTRSDKNRGKSDNVPSEEVVKKMKNYWRQLLNAKLITQRKFDNLTKAERGGLSELDKAGFIKRQLVETRQITKHVAQILDSRMNTKYDENDKLIREVKVITLKSKLVSDFRKDFQFYKVREINNYHHAHDAYLNAVVGTALIKKYPKLESEFVYGDYKVYDVRKMIAKSEQEIGKATAKYFFYSNIMNFFKTEITLANGEIRKRPLIETNGETGEIVWDKGRDFATVRKVLSMPQVNIVKKTEVQTGGFSKESILPKRNSDKLIARKKDWDPKKYGGFDSPTVAYSVLVVAKVEKGKSKKLKSVKELLGITIMERSSFEKNPIDFLEAKGYKEVKKDLIIKLPKYSLFELENGRKRMLASAGELQKGNELALPSKYVNFLYLASHYEKLKGGSSGSETPGTSESATPESSGSEVEFSHEYWMRHALTLAKRARDEREVPVGAVLVLNNRVIGEGWNRAIGLHDPTAHAEIMALRQGGLVMQNYRLIDATLYVTFEPCVMCAGAMIHSRIGRVVFGVRNAKTGAAGSLMDVLHYPGMNHRVEITEGILADECAALLCYFFRMPRQVFNAQKKAQSSTDSPEDNEQKQLFVEQHKHYLDEIIEQISEFSKRVILADANLDKVLSAYNKHRDKPIREQAENIIHLFTLTNLGAPAAFKYFDTTIDRKRYTSTKEVLDATLIHQSITGLYETRIDLSQLGGD

SEQ ID NO: 269 - protein, 1554 aa, synthetic construct
  REGION 1..1554: note = 107 Cas9 TadAins 1054 polypeptide sequence
MDKKYSIGLAIGTNSVGWAVITDEYKVPSKKFKVLGNTDRHSIKKNLIGALLFDSGETAEATRLKRTARRRYTRRKNRICYLQEIFSNEMAKVDDSFFHRLEESFLVEEDKKHERHPIFGNIVDEVAYHEKYPTIYHLRKKLVDSTDKADLRLIYLALAHMIKFRGHFLIEGDLNPDNSDVDKLFIQLVQTYNQLFEENPINASGVDAKAILSARLSKSRRLENLIAQLPGEKKNGLFGNLIALSLGLTPNFKSNFDLAEDAKLQLSKDTYDDDLDNLLAQIGDQYADLFLAAKNLSDAILLSDILRVNTEITKAPLSASMIKRYDEHHQDLTLLKALVRQQLPEKYKEIFFDQSKNGYAGYIDGGASQEEFYKFIKPILEKMDGTEELLVKLNREDLLRKQRTFDNGSIPHQIHLGELHAILRRQEDFYPFLKDNREKIEKILTFRIPYYVGPLARGNSRFAWMTRKSEETITPWNFEEVVDKGASAQSFIERMTNFDKNLPNEKVLPKHSLLYEYFTVYNELTKVKYVTEGMRKPAFLSGEQKKAIVDLLFKTNRKVTVKQLKEDYFKKIECFDSVEISGVEDRFNASLGTYHDLLKIIKDKDFLDNEENEDILEDIVLTLTLFEDREMIEERLKTYAHLFDDKVMKQLKRRRYTGWGRLSRKLINGIRDKQSGKTILDFLKSDGFANRNFMQLIHDDSLTFKEDIQKAQVSGQGDSLHEHIANLAGSPAIKKGILQTVKVVDELVKVMGRHKPENIVIEMARENQTTQKGQKNSRERMKRIEEGIKELGSQILKEHPVENTQLQNEKLYLYYLQNGRDMYVDQELDINRLSDYDVDHIVPQSFLKDDSIDNKVLTRSDKNRGKSDNVPSEEVVKKMKNYWRQLLNAKLITQRKFDNLTKAERGGLSELDKAGFIKRQLVETRQITKHVAQILDSRMNTKYDENDKLIREVKVITLKSKLVSDFRKDFQFYKVREINNYHHAHDAYLNAVVGTALIKKYPKLESEFVYGDYKVYDVRKMIAKSEQEIGKATAKYFFYSNIMNFFKTEITLANGSSGSETPGTSESATPESSGSEVEFSHEYWMRHALTLAKRARDEREVPVGAVLVLNNRVIGEGWNRAIGLHDPTAHAEIMALRQGGLVMQNYRLIDATLYVTFEPCVMCAGAMIHSRIGRVVFGVRNAKTGAAGSLMDVLHYPGMNHRVEITEGILADECAALLCYFFRMPRQVFNAQKKAQSSTDGEIRKRPLIETNGETGEIVWDKGRDFATVRKVLSMPQVNIVKKTEVQTGGFSKESILPKRNSDKLIARKKDWDPKKYGGFDSPTVAYSVLVVAKVEKGKSKKLKSVKELLGITIMERSSFEKNPIDFLEAKGYKEVKKDLIIKLPKYSLFELENGRKRMLASAGELQKGNELALPSKYVNFLYLASHYEKLKGSPEDNEQKQLFVEQHKHYLDEIIEQISEFSKRVILADANLDKVLSAYNKHRDKPIREQAENIIHLFTLTNLGAPAAFKYFDTTIDRKRYTSTKEVLDATLIHQSITGLYETRIDLSQLGGD

SEQ ID NO: 270 - protein, 1554 aa, synthetic construct
  REGION 1..1554: note = 108 Cas9 TadAins 1026 polypeptide sequence
MDKKYSIGLAIGTNSVGWAVITDEYKVPSKKFKVLGNTDRHSIKKNLIGALLFDSGETAEATRLKRTARRRYTRRKNRICYLQEIFSNEMAKVDDSFFHRLEESFLVEEDKKHERHPIFGNIVDEVAYHEKYPTIYHLRKKLVDSTDKADLRLIYLALAHMIKFRGHFLIEGDLNPDNSDVDKLFIQLVQTYNQLFEENPINASGVDAKAILSARLSKSRRLENLIAQLPGEKKNGLFGNLIALSLGLTPNFKSNFDLAEDAKLQLSKDTYDDDLDNLLAQIGDQYADLFLAAKNLSDAILLSDILRVNTEITKAPLSASMIKRYDEHHQDLTLLKALVRQQLPEKYKEIFFDQSKNGYAGYIDGGASQEEFYKFIKPILEKMDGTEELLVKLNREDLLRKQRTFDNGSIPHQIHLGELHAILRRQEDFYPFLKDNREKIEKILTFRIPYYVGPLARGNSRFAWMTRKSEETITPWNFEEVVDKGASAQSFIERMTNFDKNLPNEKVLPKHSLLYEYFTVYNELTKVKYVTEGMRKPAFLSGEQKKAIVDLLFKTNRKVTVKQLKEDYFKKIECFDSVEISGVEDRFNASLGTYHDLLKIIKDKDFLDNEENEDILEDIVLTLTLFEDREMIEERLKTYAHLFDDKVMKQLKRRRYTGWGRLSRKLINGIRDKQSGKTILDFLKSDGFANRNFMQLIHDDSLTFKEDIQKAQVSGQGDSLHEHIANLAGSPAIKKGILQTVKVVDELVKVMGRHKPENIVIEMARENQTTQKGQKNSRERMKRIEEGIKELGSQILKEHPVENTQLQNEKLYLYYLQNGRDMYVDQELDINRLSDYDVDHIVPQSFLKDDSIDNKVLTRSDKNRGKSDNVPSEEVVKKMKNYWRQLLNAKLITQRKFDNLTKAERGGLSELDKAGFIKRQLVETRQITKHVAQILDSRMNTKYDENDKLIREVKVITLKSKLVSDFRKDFQFYKVREINNYHHAHDAYLNAVVGTALIKKYPKLESEFVYGDYKVYDVRKMIAKSEGSSGSETPGTSESATPESSGSEVEFSHEYWMRHALTLAKRARDEREVPVGAVLVLNNRVIGEGWNRAIGLHDPTAHAEIMALRQGGLVMQNYRLIDATLYVTFEPCVMCAGAMIHSRIGRVVFGVRNAKTGAAGSLMDVLHYPGMNHRVEITEGILADECAALLCYFFRMPRQVFNAQKKAQSSTDQEIGKATAKYFFYSNIMNFFKTEITLANGEIRKRPLIETNGETGEIVWDKGRDFATVRKVLSMPQVNIVKKTEVQTGGFSKESILPKRNSDKLIARKKDWDPKKYGGFDSPTVAYSVLVVAKVEKGKSKKLKSVKELLGITIMERSSFEKNPIDFLEAKGYKEVKKDLIIKLPKYSLFELENGRKRMLASAGELQKGNELALPSKYVNFLYLASHYEKLKGSPEDNEQKQLFVEQHKHYLDEIIEQISEFSKRVILADANLDKVLSAYNKHRDKPIREQAENIIHLFTLTNLGAPAAFKYFDTTIDRKRYTSTKEVLDATLIHQSITGLYETRIDLSQLGGD

SEQ ID NO: 271 - protein, 1540 aa, synthetic construct
  REGION 1..1540: note = 109 Cas9 TadAins 768 polypeptide sequence
MDKKYSIGLAIGTNSVGWAVITDEYKVPSKKFKVLGNTDRHSIKKNLIGALLFDSGETAEATRLKRTARRRYTRRKNRICYLQEIFSNEMAKVDDSFFHRLEESFLVEEDKKHERHPIFGNIVDEVAYHEKYPTIYHLRKKLVDSTDKADLRLIYLALAHMIKFRGHFLIEGDLNPDNSDVDKLFIQLVQTYNQLFEENPINASGVDAKAILSARLSKSRRLENLIAQLPGEKKNGLFGNLIALSLGLTPNFKSNFDLAEDAKLQLSKDTYDDDLDNLLAQIGDQYADLFLAAKNLSDAILLSDILRVNTEITKAPLSASMIKRYDEHHQDLTLLKALVRQQLPEKYKEIFFDQSKNGYAGYIDGGASQEEFYKFIKPILEKMDGTEELLVKLNREDLLRKQRTFDNGSIPHQIHLGELHAILRRQEDFYPFLKDNREKIEKILTFRIPYYVGPLARGNSRFAWMTRKSEETITPWNFEEVVDKGASAQSFIERMTNFDKNLPNEKVLPKHSLLYEYFTVYNELTKVKYVTEGMRKPAFLSGEQKKAIVDLLFKTNRKVTVKQLKEDYFKKIECFDSVEISGVEDRFNASLGTYHDLLKIIKDKDFLDNEENEDILEDIVLTLTLFEDREMIEERLKTYAHLFDDKVMKQLKRRRYTGWGRLSRKLINGIRDKQSGKTILDFLKSDGFANRNFMQLIHDDSLTFKEDIQKAQVSGQGDSLHEHIANLAGSPAIKKGILQTVKVVDELVKVMGRHKPENIVIEMARENQGSSGSETPGTSESATPESSGSEVEFSHEYWMRHALTLAKRARDEREVPVGAVLVLNNRVIGEGWNRAIGLHDPTAHAEIMALRQGGLVMQNYRLIDATLYVTFEPCVMCAGAMIHSRIGRVVFGVRNAKTGAAGSLMDVLHYPGMNHRVEITEGILADECAALLCYFFRMPRTTQKGQKNSRERMKRIEEGIKELGSQILKEHPVENTQLQNEKLYLYYLQNGRDMYVDQELDINRLSDYDVDHIVPQSFLKDDSIDNKVLTRSDKNRGKSDNVPSEEVVKKMKNYWRQLLNAKLITQRKFDNLTKAERGGLSELDKAGFIKRQLVETRQITKHVAQILDSRMNTKYDENDKLIREVKVITLKSKLVSDFRKDFQFYKVREINNYHHAHDAYLNAVVGTALIKKYPKLESEFVYGDYKVYDVRKMIAKSEQEIGKATAKYFFYSNIMNFFKTEITLANGEIRKRPLIETNGETGEIVWDKGRDFATVRKVLSMPQVNIVKKTEVQTGGFSKESILPKRNSDKLIARKKDWDPKKYGGFDSPTVAYSVLVVAKVEKGKSKKLKSVKELLGITIMERSSFEKNPIDFLEAKGYKEVKKDLIIKLPKYSLFELENGRKRMLASAGELQKGNELALPSKYVNFLYLASHYEKLKGSPEDNEQKQLFVEQHKHYLDEIIEQISEFSKRVILADANLDKVLSAYNKHRDKPIREQAENIIHLFTLTNLGAPAAFKYFDTTIDRKRYTSTKEVLDATLIHQSITGLYETRIDLSQLGGD

SEQ ID NO: 272 - protein, 1540 aa, synthetic construct
  REGION 1..1540: note = 110.1 Cas9 TadAins 1250 polypeptide sequence
MDKKYSIGLAIGTNSVGWAVITDEYKVPSKKFKVLGNTDRHSIKKNLIGALLFDSGETAEATRLKRTARRRYTRRKNRICYLQEIFSNEMAKVDDSFFHRLEESFLVEEDKKHERHPIFGNIVDEVAYHEKYPTIYHLRKKLVDSTDKADLRLIYLALAHMIKFRGHFLIEGDLNPDNSDVDKLFIQLVQTYNQLFEENPINASGVDAKAILSARLSKSRRLENLIAQLPGEKKNGLFGNLIALSLGLTPNFKSNFDLAEDAKLQLSKDTYDDDLDNLLAQIGDQYADLFLAAKNLSDAILLSDILRVNTEITKAPLSASMIKRYDEHHQDLTLLKALVRQQLPEKYKEIFFDQSKNGYAGYIDGGASQEEFYKFIKPILEKMDGTEELLVKLNREDLLRKQRTFDNGSIPHQIHLGELHAILRRQEDFYPFLKDNREKIEKILTFRIPYYVGPLARGNSRFAWMTRKSEETITPWNFEEVVDKGASAQSFIERMTNFDKNLPNEKVLPKHSLLYEYFTVYNELTKVKYVTEGMRKPAFLSGEQKKAIVDLLFKTNRKVTVKQLKEDYFKKIECFDSVEISGVEDRFNASLGTYHDLLKIIKDKDFLDNEENEDILEDIVLTLTLFEDREMIEERLKTYAHLFDDKVMKQLKRRRYTGWGRLSRKLINGIRDKQSGKTILDFLKSDGFANRNFMQLIHDDSLTFKEDIQKAQVSGQGDSLHEHIANLAGSPAIKKGILQTVKVVDELVKVMGRHKPENIVIEMARENQTTQKGQKNSRERMKRIEEGIKELGSQILKEHPVENTQLQNEKLYLYYLQNGRDMYVDQELDINRLSDYDVDHIVPQSFLKDDSIDNKVLTRSDKNRGKSDNVPSEEVVKKMKNYWRQLLNAKLITQRKFDNLTKAERGGLSELDKAGFIKRQLVETRQITKHVAQILDSRMNTKYDENDKLIREVKVITLKSKLVSDFRKDFQFYKVREINNYHHAHDAYLNAVVGTALIKKYPKLESEFVYGDYKVYDVRKMIAKSEQEIGKATAKYFFYSNIMNFFKTEITLANGEIRKRPLIETNGETGEIVWDKGRDFATVRKVLSMPQVNIVKKTEVQTGGFSKESILPKRNSDKLIARKKDWDPKKYGGFDSPTVAYSVLVVAKVEKGKSKKLKSVKELLGITIMERSSFEKNPIDFLEAKGYKEVKKDLIIKLPKYSLFELENGRKRMLASAGELQKGNELALPSKYVNFLYLASHYEKLKGSPGSSGSETPGTSESATPESSGSEVEFSHEYWMRHALTLAKRARDEREVPVGAVLVLNNRVIGEGWNRAIGLHDPTAHAEIMALRQGGLVMQNYRLIDATLYVTFEPCVMCAGAMIHSRIGRVVFGVRNAKTGAAGSLMDVLHYPGMNHRVEITEGILADECAALLCYFFRMPREDNEQKQLFVEQHKHYLDEIIEQISEFSKRVILADANLDKVLSAYNKHRDKPIREQAENIIHLFTLTNLGAPAAFKYFDTTIDRKRYTSTKEVLDATLIHQSITGLYETRIDLSQLGGD

SEQ ID NO: 273 - protein, 1543 aa, synthetic construct
  REGION 1..1543: note = 110.2 Cas9 TadAins 1250 polypeptide sequence
MDKKYSIGLAIGTNSVGWAVITDEYKVPSKKFKVLGNTDRHSIKKNLIGALLFDSGETAEATRLKRTARRRYTRRKNRICYLQEIFSNEMAKVDDSFFHRLEESFLVEEDKKHERHPIFGNIVDEVAYHEKYPTIYHLRKKLVDSTDKADLRLIYLALAHMIKFRGHFLIEGDLNPDNSDVDKLFIQLVQTYNQLFEENPINASGVDAKAILSARLSKSRRLENLIAQLPGEKKNGLFGNLIALSLGLTPNFKSNFDLAEDAKLQLSKDTYDDDLDNLLAQIGDQYADLFLAAKNLSDAILLSDILRVNTEITKAPLSASMIKRYDEHHQDLTLLKALVRQQLPEKYKEIFFDQSKNGYAGYIDGGASQEEFYKFIKPILEKMDGTEELLVKLNREDLLRKQRTFDNGSIPHQIHLGELHAILRRQEDFYPFLKDNREKIEKILTFRIPYYVGPLARGNSRFAWMTRKSEETITPWNFEEVVDKGASAQSFIERMTNFDKNLPNEKVLPKHSLLYEYFTVYNELTKVKYVTEGMRKPAFLSGEQKKAIVDLLFKTNRKVTVKQLKEDYFKKIECFDSVEISGVEDRFNASLGTYHDLLKIIKDKDFLDNEENEDILEDIVLTLTLFEDREMIEERLKTYAHLFDDKVMKQLKRRRYTGWGRLSRKLINGIRDKQSGKTILDFLKSDGFANRNFMQLIHDDSLTFKEDIQKAQVSGQGDSLHEHIANLAGSPAIKKGILQTVKVVDELVKVMGRHKPENIVIEMARENQTTQKGQKNSRERMKRIEEGIKELGSQILKEHPVENTQLQNEKLYLYYLQNGRDMYVDQELDINRLSDYDVDHIVPQSFLKDDSIDNKVLTRSDKNRGKSDNVPSEEVVKKMKNYWRQLLNAKLITQRKFDNLTKAERGGLSELDKAGFIKRQLVETRQITKHVAQILDSRMNTKYDENDKLIREVKVITLKSKLVSDFRKDFQFYKVREINNYHHAHDAYLNAVVGTALIKKYPKLESEFVYGDYKVYDVRKMIAKSEQEIGKATAKYFFYSNIMNFFKTEITLANGEIRKRPLIETNGETGEIVWDKGRDFATVRKVLSMPQVNIVKKTEVQTGGFSKESILPKRNSDKLIARKKDWDPKKYGGFDSPTVAYSVLVVAKVEKGKSKKLKSVKELLGITIMERSSFEKNPIDFLEAKGYKEVKKDLIIKLPKYSLFELENGRKRMLASAGELQKGNELALPSKYVNFLYLASHYEKLKGSPGSSGSSGSETPGTSESATPESSGSEVEFSHEYWMRHALTLAKRARDEREVPVGAVLVLNNRVIGEGWNRAIGLHDPTAHAEIMALRQGGLVMQNYRLIDATLYVTFEPCVMCAGAMIHSRIGRVVFGVRNAKTGAAGSLMDVLHYPGMNHRVEITEGILADECAALLCYFFRMPREDNEQKQLFVEQHKHYLDEIIEQISEFSKRVILADANLDKVLSAYNKHRDKPIREQAENIIHLFTLTNLGAPAAFKYFDTTIDRKRYTSTKEVLDATLIHQSITGLYETRIDLSQLGGD

SEQ ID NO: 274 - protein, 1546 aa, synthetic construct
  REGION 1..1546: note = 110.3 Cas9 TadAins 1250 polypeptide sequence
MDKKYSIGLAIGTNSVGWAVITDEYKVPSKKFKVLGNTDRHSIKKNLIGALLFDSGETAEATRLKRTARRRYTRRKNRICYLQEIFSNEMAKVDDSFFHRLEESFLVEEDKKHERHPIFGNIVDEVAYHEKYPTIYHLRKKLVDSTDKADLRLIYLALAHMIKFRGHFLIEGDLNPDNSDVDKLFIQLVQTYNQLFEENPINASGVDAKAILSARLSKSRRLENLIAQLPGEKKNGLFGNLIALSLGLTPNFKSNFDLAEDAKLQLSKDTYDDDLDNLLAQIGDQYADLFLAAKNLSDAILLSDILRVNTEITKAPLSASMIKRYDEHHQDLTLLKALVRQQLPEKYKEIFFDQSKNGYAGYIDGGASQEEFYKFIKPILEKMDGTEELLVKLNREDLLRKQRTFDNGSIPHQIHLGELHAILRRQEDFYPFLKDNREKIEKILTFRIPYYVGPLARGNSRFAWMTRKSEETITPWNFEEVVDKGASAQSFIERMTNFDKNLPNEKVLPKHSLLYEYFTVYNELTKVKYVTEGMRKPAFLSGEQKKAIVDLLFKTNRKVTVKQLKEDYFKKIECFDSVEISGVEDRFNASLGTYHDLLKIIKDKDFLDNEENEDILEDIVLTLTLFEDREMIEERLKTYAHLFDDKVMKQLKRRRYTGWGRLSRKLINGIRDKQSGKTILDFLKSDGFANRNFMQLIHDDSLTFKEDIQKAQVSGQGDSLHEHIANLAGSPAIKKGILQTVKVVDELVKVMGRHKPENIVIEMARENQTTQKGQKNSRERMKRIEEGIKELGSQILKEHPVENTQLQNEKLYLYYLQNGRDMYVDQELDINRLSDYDVDHIVPQSFLKDDSIDNKVLTRSDKNRGKSDNVPSEEVVKKMKNYWRQLLNAKLITQRKFDNLTKAERGGLSELDKAGFIKRQLVETRQITKHVAQILDSRMNTKYDENDKLIREVKVITLKSKLVSDFRKDFQFYKVREINNYHHAHDAYLNAVVGTALIKKYPKLESEFVYGDYKVYDVRKMIAKSEQEIGKATAKYFFYSNIMNFFKTEITLANGEIRKRPLIETNGETGEIVWDKGRDFATVRKVLSMPQVNIVKKTEVQTGGFSKESILPKRNSDKLIARKKDWDPKKYGGFDSPTVAYSVLVVAKVEKGKSKKLKSVKELLGITIMERSSFEKNPIDFLEAKGYKEVKKDLIIKLPKYSLFELENGRKRMLASAGELQKGNELALPSKYVNFLYLASHYEKLKGSPGSSGSSGSETPGTSESATPESGSSSGSEVEFSHEYWMRHALTLAKRARDEREVPVGAVLVLNNRVIGEGWNRAIGLHDPTAHAEIMALRQGGLVMQNYRLIDATLYVTFEPCVMCAGAMIHSRIGRVVFGVRNAKTGAAGSLMDVLHYPGMNHRVEITEGILADECAALLCYFFRMPREDNEQKQLFVEQHKHYLDEIIEQISEFSKRVILADANLDKVLSAYNKHRDKPIREQAENIIHLFTLTNLGAPAAFKYFDTTIDRKRYTSTKEVLDATLIHQSITGLYETRIDLSQLGGD

SEQ ID NO: 275 - protein, 1546 aa, synthetic construct
  REGION 1..1546: note = 110.4 Cas9 TadAins 1250 polypeptide sequence
MDKKYSIGLAIGTNSVGWAVITDEYKVPSKKFKVLGNTDRHSIKKNLIGALLFDSGETAEATRLKRTARRRYTRRKNRICYLQEIFSNEMAKVDDSFFHRLEESFLVEEDKKHERHPIFGNIVDEVAYHEKYPTIYHLRKKLVDSTDKADLRLIYLALAHMIKFRGHFLIEGDLNPDNSDVDKLFIQLVQTYNQLFEENPINASGVDAKAILSARLSKSRRLENLIAQLPGEKKNGLFGNLIALSLGLTPNFKSNFDLAEDAKLQLSKDTYDDDLDNLLAQIGDQYADLFLAAKNLSDAILLSDILRVNTEITKAPLSASMIKRYDEHHQDLTLLKALVRQQLPEKYKEIFFDQSKNGYAGYIDGGASQEEFYKFIKPILEKMDGTEELLVKLNREDLLRKQRTFDNGSIPHQIHLGELHAILRRQEDFYPFLKDNREKIEKILTFRIPYYVGPLARGNSRFAWMTRKSEETITPWNFEEVVDKGASAQSFIERMTNFDKNLPNEKVLPKHSLLYEYFTVYNELTKVKYVTEGMRKPAFLSGEQKKAIVDLLFKTNRKVTVKQLKEDYFKKIECFDSVEISGVEDRFNASLGTYHDLLKIIKDKDFLDNEENEDILEDIVLTLTLFEDREMIEERLKTYAHLFDDKVMKQLKRRRYTGWGRLSRKLINGIRDKQSGKTILDFLKSDGFANRNFMQLIHDDSLTFKEDIQKAQVSGQGDSLHEHIANLAGSPAIKKGILQTVKVVDELVKVMGRHKPENIVIEMARENQTTQKGQKNSRERMKRIEEGIKELGSQILKEHPVENTQLQNEKLYLYYLQNGRDMYVDQELDINRLSDYDVDHIVPQSFLKDDSIDNKVLTRSDKNRGKSDNVPSEEVVKKMKNYWRQLLNAKLITQRKFDNLTKAERGGLSELDKAGFIKRQLVETRQITKHVAQILDSRMNTKYDENDKLIREVKVITLKSKLVSDFRKDFQFYKVREINNYHHAHDAYLNAVVGTALIKKYPKLESEFVYGDYKVYDVRKMIAKSEQEIGKATAKYFFYSNIMNFFKTEITLANGEIRKRPLIETNGETGEIVWDKGRDFATVRKVLSMPQVNIVKKTEVQTGGFSKESILPKRNSDKLIARKKDWDPKKYGGFDSPTVAYSVLVVAKVEKGKSKKLKSVKELLGITIMERSSFEKNPIDFLEAKGYKEVKKDLIIKLPKYSLFELENGRKRMLASAGELQKGNELALPSKYVNFLYLASHYEKLKGSPGSSGSSGSETPGTSESATPESGSSSGSEVEFSHEYWMRHALTLAKRARDEREVPVGAVLVLNNRVIGEGWNRAIGLHDPTAHAEIMALRQGGLVMQNYRLIDATLYVTFEPCVMCAGAMIHSRIGRVVFGVRNAKTGAAGSLMDVLHYPGMNHRVEITEGILADECAALLCYFFRMRREDNEQKQLFVEQHKHYLDEIIEQISEFSKRVILADANLDKVLSAYNKHRDKPIREQAENIIHLFTLTNLGAPAAFKYFDTTIDRKRYTSTKEVLDATLIHQSITGLYETRIDLSQLGGD

SEQ ID NO: 276 - protein, 1546 aa, synthetic construct
  REGION 1..1546: note = 110.5 Cas9 TadAins 1249 polypeptide sequence
MDKKYSIGLAIGTNSVGWAVITDEYKVPSKKFKVLGNTDRHSIKKNLIGALLFDSGETAEATRLKRTARRRYTRRKNRICYLQEIFSNEMAKVDDSFFHRLEESFLVEEDKKHERHPIFGNIVDEVAYHEKYPTIYHLRKKLVDSTDKADLRLIYLALAHMIKFRGHFLIEGDLNPDNSDVDKLFIQLVQTYNQLFEENPINASGVDAKAILSARLSKSRRLENLIAQLPGEKKNGLFGNLIALSLGLTPNFKSNFDLAEDAKLQLSKDTYDDDLDNLLAQIGDQYADLFLAAKNLSDAILLSDILRVNTEITKAPLSASMIKRYDEHHQDLTLLKALVRQQLPEKYKEIFFDQSKNGYAGYIDGGASQEEFYKFIKPILEKMDGTEELLVKLNREDLLRKQRTFDNGSIPHQIHLGELHAILRRQEDFYPFLKDNREKIEKILTFRIPYYVGPLARGNSRFAWMTRKSEETITPWNFEEVVDKGASAQSFIERMTNFDKNLPNEKVLPKHSLLYEYFTVYNELTKVKYVTEGMRKPAFLSGEQKKAIVDLLFKTNRKVTVKQLKEDYFKKIECFDSVEISGVEDRFNASLGTYHDLLKIIKDKDFLDNEENEDILEDIVLTLTLFEDREMIEERLKTYAHLFDDKVMKQLKRRRYTGWGRLSRKLINGIRDKQSGKTILDFLKSDGFANRNFMQLIHDDSLTFKEDIQKAQVSGQGDSLHEHIANLAGSPAIKKGILQTVKVVDELVKVMGRHKPENIVIEMARENQTTQKGQKNSRERMKRIEEGIKELGSQILKEHPVENTQLQNEKLYLYYLQNGRDMYVDQELDINRLSDYDVDHIVPQSFLKDDSIDNKVLTRSDKNRGKSDNVPSEEVVKKMKNYWRQLLNAKLITQRKFDNLTKAERGGLSELDKAGFIKRQLVETRQITKHVAQILDSRMNTKYDENDKLIREVKVITLKSKLVSDFRKDFQFYKVREINNYHHAHDAYLNAVVGTALIKKYPKLESEFVYGDYKVYDVRKMIAKSEQEIGKATAKYFFYSNIMNFFKTEITLANGEIRKRPLIETNGETGEIVWDKGRDFATVRKVLSMPQVNIVKKTEVQTGGFSKESILPKRNSDKLIARKKDWDPKKYGGFDSPTVAYSVLVVAKVEKGKSKKLKSVKELLGITIMERSSFEKNPIDFLEAKGYKEVKKDLIIKLPKYSLFELENGRKRMLASAGELQKGNELALPSKYVNFLYLASHYEKLKGSGSSGSSGSETPGTSESATPESGSSSGSEVEFSHEYWMRHALTLAKRARDEREVPVGAVLVLNNRVIGEGWNRAIGLHDPTAHAEIMALRQGGLVMQNYRLIDATLYVTFEPCVMCAGAMIHSRIGRVVFGVRNAKTGAAGSLMDVLHYPGMNHRVEITEGILADECAALLCYFFRMRRPEDNEQKQLFVEQHKHYLDEIIEQISEFSKRVILADANLDKVLSAYNKHRDKPIREQAENIIHLFTLTNLGAPAAFKYFDTTIDRKRYTSTKEVLDATLIHQSITGLYETRIDLSQLGGD

SEQ ID NO: 277 - protein, 1551 aa, synthetic construct
  REGION 1..1551: note = 110.5 Cas9 TadAins delta59-66 1250 polypeptide sequence
MDKKYSIGLAIGTNSVGWAVITDEYKVPSKKFKVLGNTDRHSIKKNLIGALLFDSGETAEATRLKRTARRRYTRRKNRICYLQEIFSNEMAKVDDSFFHRLEESFLVEEDKKHERHPIFGNIVDEVAYHEKYPTIYHLRKKLVDSTDKADLRLIYLALAHMIKFRGHFLIEGDLNPDNSDVDKLFIQLVQTYNQLFEENPINASGVDAKAILSARLSKSRRLENLIAQLPGEKKNGLFGNLIALSLGLTPNFKSNFDLAEDAKLQLSKDTYDDDLDNLLAQIGDQYADLFLAAKNLSDAILLSDILRVNTEITKAPLSASMIKRYDEHHQDLTLLKALVRQQLPEKYKEIFFDQSKNGYAGYIDGGASQEEFYKFIKPILEKMDGTEELLVKLNREDLLRKQRTFDNGSIPHQIHLGELHAILRRQEDFYPFLKDNREKIEKILTFRIPYYVGPLARGNSRFAWMTRKSEETITPWNFEEVVDKGASAQSFIERMTNFDKNLPNEKVLPKHSLLYEYFTVYNELTKVKYVTEGMRKPAFLSGEQKKAIVDLLFKTNRKVTVKQLKEDYFKKIECFDSVEISGVEDRFNASLGTYHDLLKIIKDKDFLDNEENEDILEDIVLTLTLFEDREMIEERLKTYAHLFDDKVMKQLKRRRYTGWGRLSRKLINGIRDKQSGKTILDFLKSDGFANRNFMQLIHDDSLTFKEDIQKAQVSGQGDSLHEHIANLAGSPAIKKGILQTVKVVDELVKVMGRHKPENIVIEMARENQTTQKGQKNSRERMKRIEEGIKELGSQILKEHPVENTQLQNEKLYLYYLQNGRDMYVDQELDINRLSDYDVDHIVPQSFLKDDSIDNKVLTRSDKNRGKSDNVPSEEVVKKMKNYWRQLLNAKLITQRKFDNLTKAERGGLSELDKAGFIKRQLVETRQITKHVAQILDSRMNTKYDENDKLIREVKVITLKSKLVSDFRKDFQFYKVREINNYHHAHDAYLNAVVGTALIKKYPKLESEFVYGDYKVYDVRKMIAKSEQEIGKATAKYFFYSNIMNFFKTEITLANGEIRKRPLIETNGETGEIVWDKGRDFATVRKVLSMPQVNIVKKTEVQTGGFSKESILPKRNSDKLIARKKDWDPKKYGGFDSPTVAYSVLVVAKVEKGKSKKLKSVKELLGITIMERSSFEKNPIDFLEAKGYKEVKKDLIIKLPKYSLFELENGRKRMLASAGELQKGNELALPSKYVNFLYLASHYEKLKGSPGSSGSSGSETPGTSESATPESGSSGSEVEFSHEYWMRHALTLAKRARDEREVPVGAVLVLNNRVIGEGWNRAHAEIMALRQGGLVMQNYRLIDATLYVTFEPCVMCAGAMIHSRIGRVVFGVRNAKTGAAGSLMDVLHYPGMNHRVEITEGILADECAALLCYFFRMPRQVFNAQKKAQSSTDEDNEQKQLFVEQHKHYLDEIIEQISEFSKRVILADANLDKVLSAYNKHRDKPIREQAENIIHLFTLTNLGAPAAFKYFDTTIDRKRYTSTKEVLDATLIHQSITGLYETRIDLSQLGGD

SEQ ID NO: 278 - protein, 1546 aa, synthetic construct
  REGION 1..1546: note = 110.6 Cas9 TadAins 1251 polypeptide sequence
MDKKYSIGLAIGTNSVGWAVITDEYKVPSKKFKVLGNTDRHSIKKNLIGALLFDSGETAEATRLKRTARRRYTRRKNRICYLQEIFSNEMAKVDDSFFHRLEESFLVEEDKKHERHPIFGNIVDEVAYHEKYPTIYHLRKKLVDSTDKADLRLIYLALAHMIKFRGHFLIEGDLNPDNSDVDKLFIQLVQTYNQLFEENPINASGVDAKAILSARLSKSRRLENLIAQLPGEKKNGLFGNLIALSLGLTPNFKSNFDLAEDAKLQLSKDTYDDDLDNLLAQIGDQYADLFLAAKNLSDAILLSDILRVNTEITKAPLSASMIKRYDEHHQDLTLLKALVRQQLPEKYKEIFFDQSKNGYAGYIDGGASQEEFYKFIKPILEKMDGTEELLVKLNREDLLRKQRTFDNGSIPHQIHLGELHAILRRQEDFYPFLKDNREKIEKILTFRIPYYVGPLARGNSRFAWMTRKSEETITPWNFEEVVDKGASAQSFIERMTNFDKNLPNEKVLPKHSLLYEYFTVYNELTKVKYVTEGMRKPAFLSGEQKKAIVDLLFKTNRKVTVKQLKEDYFKKIECFDSVEISGVEDRFNASLGTYHDLLKIIKDKDFLDNEENEDILEDIVLTLTLFEDREMIEERLKTYAHLFDDKVMKQLKRRRYTGWGRLSRKLINGIRDKQSGKTILDFLKSDGFANRNFMQLIHDDSLTFKEDIQKAQVSGQGDSLHEHIANLAGSPAIKKGILQTVKVVDELVKVMGRHKPENIVIEMARENQTTQKGQKNSRERMKRIEEGIKELGSQILKEHPVENTQLQNEKLYLYYLQNGRDMYVDQELDINRLSDYDVDHIVPQSFLKDDSIDNKVLTRSDKNRGKSDNVPSEEVVKKMKNYWRQLLNAKLITQRKFDNLTKAERGGLSELDKAGFIKRQLVETRQITKHVAQILDSRMNTKYDENDKLIREVKVITLKSKLVSDFRKDFQFYKVREINNYHHAHDAYLNAVVGTALIKKYPKLESEFVYGDYKVYDVRKMIAKSEQEIGKATAKYFFYSNIMNFFKTEITLANGEIRKRPLIETNGETGEIVWDKGRDFATVRKVLSMPQVNIVKKTEVQTGGFSKESILPKRNSDKLIARKKDWDPKKYGGFDSPTVAYSVLVVAKVEKGKSKKLKSVKELLGITIMERSSFEKNPIDFLEAKGYKEVKKDLIIKLPKYSLFELENGRKRMLASAGELQKGNELALPSKYVNFLYLASHYEKLKGSPEGSSGSSGSETPGTSESATPESGSSSGSEVEFSHEYWMRHALTLAKRARDEREVPVGAVLVLNNRVIGEGWNRAIGLHDPTAHAEIMALRQGGLVMQNYRLIDATLYVTFEPCVMCAGAMIHSRIGRVVFGVRNAKTGAAGSLMDVLHYPGMNHRVEITEGILADECAALLCYFFRMRRDNEQKQLFVEQHKHYLDEIIEQISEFSKRVILADANLDKVLSAYNKHRDKPIREQAENIIHLFTLTNLGAPAAFKYFDTTIDRKRYTSTKEVLDATLIHQSITGLYETRIDLSQLGGD

SEQ ID NO: 279 - protein, 1546 aa, synthetic construct
  REGION 1..1546: note = 110.7 Cas9 TadAins 1252 polypeptide sequence
MDKKYSIGLAIGTNSVGWAVITDEYKVPSKKFKVLGNTDRHSIKKNLIGALLFDSGETAEATRLKRTARRRYTRRKNRICYLQEIFSNEMAKVDDSFFHRLEESFLVEEDKKHERHPIFGNIVDEVAYHEKYPTIYHLRKKLVDSTDKADLRLIYLALAHMIKFRGHFLIEGDLNPDNSDVDKLFIQLVQTYNQLFEENPINASGVDAKAILSARLSKSRRLENLIAQLPGEKKNGLFGNLIALSLGLTPNFKSNFDLAEDAKLQLSKDTYDDDLDNLLAQIGDQYADLFLAAKNLSDAILLSDILRVNTEITKAPLSASMIKRYDEHHQDLTLLKALVRQQLPEKYKEIFFDQSKNGYAGYIDGGASQEEFYKFIKPILEKMDGTEELLVKLNREDLLRKQRTFDNGSIPHQIHLGELHAILRRQEDFYPFLKDNREKIEKILTFRIPYYVGPLARGNSRFAWMTRKSEETITPWNFEEVVDKGASAQSFIERMTNFDKNLPNEKVLPKHSLLYEYFTVYNELTKVKYVTEGMRKPAFLSGEQKKAIVDLLFKTNRKVTVKQLKEDYFKKIECFDSVEISGVEDRFNASLGTYHDLLKIIKDKDFLDNEENEDILEDIVLTLTLFEDREMIEERLKTYAHLFDDKVMKQLKRRRYTGWGRLSRKLINGIRDKQSGKTILDFLKSDGFANRNFMQLIHDDSLTFKEDIQKAQVSGQGDSLHEHIANLAGSPAIKKGILQTVKVVDELVKVMGRHKPENIVIEMARENQTTQKGQKNSRERMKRIEEGIKELGSQILKEHPVENTQLQNEKLYLYYLQNGRDMYVDQELDINRLSDYDVDHIVPQSFLKDDSIDNKVLTRSDKNRGKSDNVPSEEVVKKMKNYWRQLLNAKLITQRKFDNLTKAERGGLSELDKAGFIKRQLVETRQITKHVAQILDSRMNTKYDENDKLIREVKVITLKSKLVSDFRKDFQFYKVREINNYHHAHDAYLNAVVGTALIKKYPKLESEFVYGDYKVYDVRKMIAKSEQEIGKATAKYFFYSNIMNFFKTEITLANGEIRKRPLIETNGETGEIVWDKGRDFATVRKVLSMPQVNIVKKTEVQTGGFSKESILPKRNSDKLIARKKDWDPKKYGGFDSPTVAYSVLVVAKVEKGKSKKLKSVKELLGITIMERSSFEKNPIDFLEAKGYKEVKKDLIIKLPKYSLFELENGRKRMLASAGELQKGNELALPSKYVNFLYLASHYEKLKGSPEDGSSGSSGSETPGTSESATPESGSSSGSEVEFSHEYWMRHALTLAKRARDEREVPVGAVLVLNNRVIGEGWNRAIGLHDPTAHAEIMALRQGGLVMQNYRLIDATLYVTFEPCVMCAGAMIHSRIGRVVFGVRNAKTGAAGSLMDVLHYPGMNHRVEITEGILADECAALLCYFFRMRRNEQKQLFVEQHKHYLDEIIEQISEFSKRVILADANLDKVLSAYNKHRDKPIREQAENIIHLFTLTNLGAPAAFKYFDTTIDRKRYTSTKEVLDATLIHQSITGLYETRIDLSQLGGD

SEQ ID NO: 280 - protein, 1533 aa, synthetic construct
  REGION 1..1533: note = 110.8 Cas9 TadAins delta59-66 C-truncate 1250 polypeptide sequence
MDKKYSIGLAIGTNSVGWAVITDEYKVPSKKFKVLGNTDRHSIKKNLIGALLFDSGETAEATRLKRTARRRYTRRKNRICYLQEIFSNEMAKVDDSFFHRLEESFLVEEDKKHERHPIFGNIVDEVAYHEKYPTIYHLRKKLVDSTDKADLRLIYLALAHMIKFRGHFLIEGDLNPDNSDVDKLFIQLVQTYNQLFEENPINASGVDAKAILSARLSKSRRLENLIAQLPGEKKNGLFGNLIALSLGLTPNFKSNFDLAEDAKLQLSKDTYDDDLDNLLAQIGDQYADLFLAAKNLSDAILLSDILRVNTEITKAPLSASMIKRYDEHHQDLTLLKALVRQQLPEKYKEIFFDQSKNGYAGYIDGGASQEEFYKFIKPILEKMDGTEELLVKLNREDLLRKQRTFDNGSIPHQIHLGELHAILRRQEDFYPFLKDNREKIEKILTFRIPYYVGPLARGNSRFAWMTRKSEETITPWNFEEVVDKGASAQSFIERMTNFDKNLPNEKVLPKHSLLYEYFTVYNELTKVKYVTEGMRKPAFLSGEQKKAIVDLLFKTNRKVTVKQLKEDYFKKIECFDSVEISGVEDRFNASLGTYHDLLKIIKDKDFLDNEENEDILEDIVLTLTLFEDREMIEERLKTYAHLFDDKVMKQLKRRRYTGWGRLSRKLINGIRDKQSGKTILDFLKSDGFANRNFMQLIHDDSLTFKEDIQKAQVSGQGDSLHEHIANLAGSPAIKKGILQTVKVVDELVKVMGRHKPENIVIEMARENQTTQKGQKNSRERMKRIEEGIKELGSQILKEHPVENTQLQNEKLYLYYLQNGRDMYVDQELDINRLSDYDVDHIVPQSFLKDDSIDNKVLTRSDKNRGKSDNVPSEEVVKKMKNYWRQLLNAKLITQRKFDNLTKAERGGLSELDKAGFIKRQLVETRQITKHVAQILDSRMNTKYDENDKLIREVKVITLKSKLVSDFRKDFQFYKVREINNYHHAHDAYLNAVVGTALIKKYPKLESEFVYGDYKVYDVRKMIAKSEQEIGKATAKYFFYSNIMNFFKTEITLANGEIRKRPLIETNGETGEIVWDKGRDFATVRKVLSMPQVNIVKKTEVQTGGFSKESILPKRNSDKLIARKKDWDPKKYGGFDSPTVAYSVLVVAKVEKGKSKKLKSVKELLGITIMERSSFEKNPIDFLEAKGYKEVKKDLIIKLPKYSLFELENGRKRMLASAGELQKGNELALPSKYVNFLYLASHYEKLKGSPGSSGSETPGTSESATPESSGSEVEFSHEYWMRHALTLAKRARDEREVPVGAVLVLNNRVIGEGWNRAHAEIMALRQGGLVMQNYRLIDATLYVTFEPCVMCAGAMIHSRIGRVVFGVRNAKTGAAGSLMDVLHYPGMNHRVEITEGILADECAALLCYFFRMPRQEDNEQKQLFVEQHKHYLDEIIEQISEFSKRVILADANLDKVLSAYNKHRDKPIREQAENIIHLFTLTNLGAPAAFKYFDTTIDRKRYTSTKEVLDATLIHQSITGLYETRIDLSQLGGD

SEQ ID NO: 281 - protein, 1549 aa, synthetic construct
  REGION 1..1549: note = 111.1 Cas9 TadAins 997 polypeptide sequence
MDKKYSIGLAIGTNSVGWAVITDEYKVPSKKFKVLGNTDRHSIKKNLIGALLFDSGETAEATRLKRTARRRYTRRKNRICYLQEIFSNEMAKVDDSFFHRLEESFLVEEDKKHERHPIFGNIVDEVAYHEKYPTIYHLRKKLVDSTDKADLRLIYLALAHMIKFRGHFLIEGDLNPDNSDVDKLFIQLVQTYNQLFEENPINASGVDAKAILSARLSKSRRLENLIAQLPGEKKNGLFGNLIALSLGLTPNFKSNFDLAEDAKLQLSKDTYDDDLDNLLAQIGDQYADLFLAAKNLSDAILLSDILRVNTEITKAPLSASMIKRYDEHHQDLTLLKALVRQQLPEKYKEIFFDQSKNGYAGYIDGGASQEEFYKFIKPILEKMDGTEELLVKLNREDLLRKQRTFDNGSIPHQIHLGELHAILRRQEDFYPFLKDNREKIEKILTFRIPYYVGPLARGNSRFAWMTRKSEETITPWNFEEVVDKGASAQSFIERMTNFDKNLPNEKVLPKHSLLYEYFTVYNELTKVKYVTEGMRKPAFLSGEQKKAIVDLLFKTNRKVTVKQLKEDYFKKIECFDSVEISGVEDRFNASLGTYHDLLKIIKDKDFLDNEENEDILEDIVLTLTLFEDREMIEERLKTYAHLFDDKVMKQLKRRRYTGWGRLSRKLINGIRDKQSGKTILDFLKSDGFANRNFMQLIHDDSLTFKEDIQKAQVSGQGDSLHEHIANLAGSPAIKKGILQTVKVVDELVKVMGRHKPENIVIEMARENQTTQKGQKNSRERMKRIEEGIKELGSQILKEHPVENTQLQNEKLYLYYLQNGRDMYVDQELDINRLSDYDVDHIVPQSFLKDDSIDNKVLTRSDKNRGKSDNVPSEEVVKKMKNYWRQLLNAKLITQRKFDNLTKAERGGLSELDKAGFIKRQLVETRQITKHVAQILDSRMNTKYDENDKLIREVKVITLKSKLVSDFRKDFQFYKVREINNYHHAHDAYLNAVVGTALSHEYWMRHALTLAKRARDEREVPVGAVLVLNNRVIGEGWNRAIGLHDPTAHAEIMALRQGGLVMQNYRLIDATLYVTFEPCVMCAGAMIHSRIGRVVFGVRNAKTGAAGSLMDVLHYPGMNHRVEITEGILADECAALLCYFFRMPRQVFNAQKKAQSSTDGSSGSETPGTSESATPESSGIKKYPKLESEFVYGDYKVYDVRKMIAKSEQEIGKATAKYFFYSNIMNFFKTEITLANGEIRKRPLIETNGETGEIVWDKGRDFATVRKVLSMPQVNIVKKTEVQTGGFSKESILPKRNSDKLIARKKDWDPKKYGGFDSPTVAYSVLVVAKVEKGKSKKLKSVKELLGITIMERSSFEKNPIDFLEAKGYKEVKKDLIIKLPKYSLFELENGRKRMLASAGELQKGNELALPSKYVNFLYLASHYEKLKGSPEDNEQKQLFVEQHKHYLDEIIEQISEFSKRVILADANLDKVLSAYNKHRDKPIREQAENIIHLFTLTNLGAPAAFKYFDTTIDRKRYTSTKEVLDATLIHQSITGLYETRIDLSQLGGD

SEQ ID NO: 282 - protein, 1555 aa, synthetic construct
  REGION 1..1555: note = 111.2 Cas9 TadAins 997 polypeptide sequence
MDKKYSIGLAIGTNSVGWAVITDEYKVPSKKFKVLGNTDRHSIKKNLIGALLFDSGETAEATRLKRTARRRYTRRKNRICYLQEIFSNEMAKVDDSFFHRLEESFLVEEDKKHERHPIFGNIVDEVAYHEKYPTIYHLRKKLVDSTDKADLRLIYLALAHMIKFRGHFLIEGDLNPDNSDVDKLFIQLVQTYNQLFEENPINASGVDAKAILSARLSKSRRLENLIAQLPGEKKNGLFGNLIALSLGLTPNFKSNFDLAEDAKLQLSKDTYDDDLDNLLAQIGDQYADLFLAAKNLSDAILLSDILRVNTEITKAPLSASMIKRYDEHHQDLTLLKALVRQQLPEKYKEIFFDQSKNGYAGYIDGGASQEEFYKFIKPILEKMDGTEELLVKLNREDLLRKQRTFDNGSIPHQIHLGELHAILRRQEDFYPFLKDNREKIEKILTFRIPYYVGPLARGNSRFAWMTRKSEETITPWNFEEVVDKGASAQSFIERMTNFDKNLPNEKVLPKHSLLYEYFTVYNELTKVKYVTEGMRKPAFLSGEQKKAIVDLLFKTNRKVTVKQLKEDYFKKIECFDSVEISGVEDRFNASLGTYHDLLKIIKDKDFLDNEENEDILEDIVLTLTLFEDREMIEERLKTYAHLFDDKVMKQLKRRRYTGWGRLSRKLINGIRDKQSGKTILDFLKSDGFANRNFMQLIHDDSLTFKEDIQKAQVSGQGDSLHEHIANLAGSPAIKKGILQTVKVVDELVKVMGRHKPENIVIEMARENQTTQKGQKNSRERMKRIEEGIKELGSQILKEHPVENTQLQNEKLYLYYLQNGRDMYVDQELDINRLSDYDVDHIVPQSFLKDDSIDNKVLTRSDKNRGKSDNVPSEEVVKKMKNYWRQLLNAKLITQRKFDNLTKAERGGLSELDKAGFIKRQLVETRQITKHVAQILDSRMNTKYDENDKLIREVKVITLKSKLVSDFRKDFQFYKVREINNYHHAHDAYLNAVVGTALSHEYWMRHALTLAKRARDEREVPVGAVLVLNNRVIGEGWNRAIGLHDPTAHAEIMALRQGGLVMQNYRLIDATLYVTFEPCVMCAGAMIHSRIGRVVFGVRNAKTGAAGSLMDVLHYPGMNHRVEITEGILADECAALLCYFFRMPRQVFNAQKKAQSSTDGSSGSSGSETPGTSESATPESSGGSSIKKYPKLESEFVYGDYKVYDVRKMIAKSEQEIGKATAKYFFYSNIMNFFKTEITLANGEIRKRPLIETNGETGEIVWDKGRDFATVRKVLSMPQVNIVKKTEVQTGGFSKESILPKRNSDKLIARKKDWDPKKYGGFDSPTVAYSVLVVAKVEKGKSKKLKSVKELLGITIMERSSFEKNPIDFLEAKGYKEVKKDLIIKLPKYSLFELENGRKRMLASAGELQKGNELALPSKYVNFLYLASHYEKLKGSPEDNEQKQLFVEQHKHYLDEIIEQISEFSKRVILADANLDKVLSAYNKHRDKPIREQAENIIHLFTLTNLGAPAAFKYFDTTIDRKRYTSTKEVLDATLIHQSITGLYETRIDLSQLGGD

SEQ ID NO: 283 - protein, 1421 aa, synthetic construct
  REGION 1..1421: note = 112 delta HNH TadA polypeptide sequence
MDKKYSIGLAIGTNSVGWAVITDEYKVPSKKFKVLGNTDRHSIKKNLIGALLFDSGETAEATRLKRTARRRYTRRKNRICYLQEIFSNEMAKVDDSFFHRLEESFLVEEDKKHERHPIFGNIVDEVAYHEKYPTIYHLRKKLVDSTDKADLRLIYLALAHMIKFRGHFLIEGDLNPDNSDVDKLFIQLVQTYNQLFEENPINASGVDAKAILSARLSKSRRLENLIAQLPGEKKNGLFGNLIALSLGLTPNFKSNFDLAEDAKLQLSKDTYDDDLDNLLAQIGDQYADLFLAAKNLSDAILLSDILRVNTEITKAPLSASMIKRYDEHHQDLTLLKALVRQQLPEKYKEIFFDQSKNGYAGYIDGGASQEEFYKFIKPILEKMDGTEELLVKLNREDLLRKQRTFDNGSIPHQIHLGELHAILRRQEDFYPFLKDNREKIEKILTFRIPYYVGPLARGNSRFAWMTRKSEETITPWNFEEVVDKGASAQSFIERMTNFDKNLPNEKVLPKHSLLYEYFTVYNELTKVKYVTEGMRKPAFLSGEQKKAIVDLLFKTNRKVTVKQLKEDYFKKIECFDSVEISGVEDRFNASLGTYHDLLKIIKDKDFLDNEENEDILEDIVLTLTLFEDREMIEERLKTYAHLFDDKVMKQLKRRRYTGWGRLSRKLINGIRDKQSGKTILDFLKSDGFANRNFMQLIHDDSLTFKEDIQKAQVSGQGDSLHEHIANLAGSPAIKKGILQTVKVVDELVKVMGRHKPENIVIEMARENQTTQKGQKNSRERMKRIEEGIKELGSEVEFSHEYWMRHALTLAKRARDEREVPVGAVLVLNNRVIGEGWNRAIGLHDPTAHAEIMALRQGGLVMQNYRLIDATLYVTFEPCVMCAGAMIHSRIGRVVFGVRNAKTGAAGSLMDVLHYPGMNHRVEITEGILADECAALLCYFFRMPRQVFNAQKKAQSSTDGGLSELDKAGFIKRQLVETRQITKHVAQILDSRMNTKYDENDKLIREVKVITLKSKLVSDFRKDFQFYKVREINNYHHAHDAYLNAVVGTALIKKYPKLESEFVYGDYKVYDVRKMIAKSEQEIGKATAKYFFYSNIMNFFKTEITLANGEIRKRPLIETNGETGEIVWDKGRDFATVRKVLSMPQVNIVKKTEVQTGGFSKESILPKRNSDKLIARKKDWDPKKYGGFDSPTVAYSVLVVAKVEKGKSKKLKSVKELLGITIMERSSFEKNPIDFLEAKGYKEVKKDLIIKLPKYSLFELENGRKRMLASAGELQKGNELALPSKYVNFLYLASHYEKLKGSPEDNEQKQLFVEQHKHYLDEIIEQISEFSKRVILADANLDKVLSAYNKHRDKPIREQAENIIHLFTLTNLGAPAAFKYFDTTIDRKRYTSTKEVLDATLIHQSITGLYETRIDLSQLGGD

SEQ ID NO: 284 - protein, 1552 aa, synthetic construct
  REGION 1..1552: note = 113 N-term single TadA helixtrunc 165-end polypeptide sequence
MSEVEFSHEYWMRHALTLAKRARDEREVPVGAVLVLNNRVIGEGWNRAIGLHDPTAHAEIMALRQGGLVMQNYRLIDATLYVTFEPCVMCAGAMIHSRIGRVVFGVRNAKTGAAGSLMDVLHYPGMNHRVEITEGILADECAALLCYFFRMPRSGGSSGGSSGSETPGTSESATPESSGGSSGGSDKKYSIGLAIGTNSVGWAVITDEYKVPSKKFKVLGNTDRHSIKKNLIGALLFDSGETAEATRLKRTARRRYTRRKNRICYLQEIFSNEMAKVDDSFFHRLEESFLVEEDKKHERHPIFGNIVDEVAYHEKYPTIYHLRKKLVDSTDKADLRLIYLALAHMIKFRGHFLIEGDLNPDNSDVDKLFIQLVQTYNQLFEENPINASGVDAKAILSARLSKSRRLENLIAQLPGEKKNGLFGNLIALSLGLTPNFKSNFDLAEDAKLQLSKDTYDDDLDNLLAQIGDQYADLFLAAKNLSDAILLSDILRVNTEITKAPLSASMIKRYDEHHQDLTLLKALVRQQLPEKYKEIFFDQSKNGYAGYIDGGASQEEFYKFIKPILEKMDGTEELLVKLNREDLLRKQRTFDNGSIPHQIHLGELHAILRRQEDFYPFLKDNREKIEKILTFRIPYYVGPLARGNSRFAWMTRKSEETITPWNFEEVVDKGASAQSFIERMTNFDKNLPNEKVLPKHSLLYEYFTVYNELTKVKYVTEGMRKPAFLSGEQKKAIVDLLFKTNRKVTVKQLKEDYFKKIECFDSVEISGVEDRFNASLGTYHDLLKIIKDKDFLDNEENEDILEDIVLTLTLFEDREMIEERLKTYAHLFDDKVMKQLKRRRYTGWGRLSRKLINGIRDKQSGKTILDFLKSDGFANRNFMQLIHDDSLTFKEDIQKAQVSGQGDSLHEHIANLAGSPAIKKGILQTVKVVDELVKVMGRHKPENIVIEMARENQTTQKGQKNSRERMKRIEEGIKELGSQILKEHPVENTQLQNEKLYLYYLQNGRDMYVDQELDINRLSDYDVDHIVPQSFLKDDSIDNKVLTRSDKNRGKSDNVPSEEVVKKMKNYWRQLLNAKLITQRKFDNLTKAERGGLSELDKAGFIKRQLVETRQITKHVAQILDSRMNTKYDENDKLIREVKVITLKSKLVSDFRKDFQFYKVREINNYHHAHDAYLNAVVGTALIKKYPKLESEFVYGDYKVYDVRKMIAKSEQEIGKATAKYFFYSNIMNFFKTEITLANGEIRKRPLIETNGETGEIVWDKGRDFATVRKVLSMPQVNIVKKTEVQTGGFSKESILPKRNSDKLIARKKDWDPKKYGGFDSPTVAYSVLVVAKVEKGKSKKLKSVKELLGITIMERSSFEKNPIDFLEAKGYKEVKKDLIIKLPKYSLFELENGRKRMLASAGELQKGNELALPSKYVNFLYLASHYEKLKGSPEDNEQKQLFVEQHKHYLDEIIEQISEFSKRVILADANLDKVLSAYNKHRDKPIREQAENIIHLFTLTNLGAPAAFKYFDTTIDRKRYTSTKEVLDATLIHQSITGLYETRIDLSQLGGD

SEQ ID NO: 285 - protein, 1545 aa, synthetic construct
  REGION 1..1545: note = 114 N-term single TadA helixtrunc 165-end delta 59-65 polypeptide sequence
MSEVEFSHEYWMRHALTLAKRARDEREVPVGAVLVLNNRVIGEGWNRTAHAEIMALRQGGLVMQNYRLIDATLYVTFEPCVMCAGAMIHSRIGRVVFGVRNAKTGAAGSLMDVLHYPGMNHRVEITEGILADECAALLCYFFRMPRSGGSSGGSSGSETPGTSESATPESSGGSSGGSDKKYSIGLAIGTNSVGWAVITDEYKVPSKKFKVLGNTDRHSIKKNLIGALLFDSGETAEATRLKRTARRRYTRRKNRICYLQEIFSNEMAKVDDSFFHRLEESFLVEEDKKHERHPIFGNIVDEVAYHEKYPTIYHLRKKLVDSTDKADLRLIYLALAHMIKFRGHFLIEGDLNPDNSDVDKLFIQLVQTYNQLFEENPINASGVDAKAILSARLSKSRRLENLIAQLPGEKKNGLFGNLIALSLGLTPNFKSNFDLAEDAKLQLSKDTYDDDLDNLLAQIGDQYADLFLAAKNLSDAILLSDILRVNTEITKAPLSASMIKRYDEHHQDLTLLKALVRQQLPEKYKEIFFDQSKNGYAGYIDGGASQEEFYKFIKPILEKMDGTEELLVKLNREDLLRKQRTFDNGSIPHQIHLGELHAILRRQEDFYPFLKDNREKIEKILTFRIPYYVGPLARGNSRFAWMTRKSEETITPWNFEEVVDKGASAQSFIERMTNFDKNLPNEKVLPKHSLLYEYFTVYNELTKVKYVTEGMRKPAFLSGEQKKAIVDLLFKTNRKVTVKQLKEDYFKKIECFDSVEISGVEDRFNASLGTYHDLLKIIKDKDFLDNEENEDILEDIVLTLTLFEDREMIEERLKTYAHLFDDKVMKQLKRRRYTGWGRLSRKLINGIRDKQSGKTILDFLKSDGFANRNFMQLIHDDSLTFKEDIQKAQVSGQGDSLHEHIANLAGSPAIKKGILQTVKVVDELVKVMGRHKPENIVIEMARENQTTQKGQKNSRERMKRIEEGIKELGSQILKEHPVENTQLQNEKLYLYYLQNGRDMYVDQELDINRLSDYDVDHIVPQSFLKDDSIDNKVLTRSDKNRGKSDNVPSEEVVKKMKNYWRQLLNAKLITQRKFDNLTKAERGGLSELDKAGFIKRQLVETRQITKHVAQILDSRMNTKYDENDKLIREVKVITLKSKLVSDFRKDFQFYKVREINNYHHAHDAYLNAVVGTALIKKYPKLESEFVYGDYKVYDVRKMIAKSEQEIGKATAKYFFYSNIMNFFKTEITLANGEIRKRPLIETNGETGEIVWDKGRDFATVRKVLSMPQVNIVKKTEVQTGGFSKESILPKRNSDKLIARKKDWDPKKYGGFDSPTVAYSVLVVAKVEKGKSKKLKSVKELLGITIMERSSFEKNPIDFLEAKGYKEVKKDLIIKLPKYSLFELENGRKRMLASAGELQKGNELALPSKYVNFLYLASHYEKLKGSPEDNEQKQLFVEQHKHYLDEIIEQISEFSKRVILADANLDKVLSAYNKHRDKPIREQAENIIHLFTLTNLGAPAAFKYFDTTIDRKRYTSTKEVLDATLIHQSITGLYETRIDLSQLGGD

SEQ ID NO: 286 - protein, 1541 aa, synthetic construct
  REGION 1..1541: note = 115.1 Cas9 TadAins 1004 polypeptide sequence
MDKKYSIGLAIGTNSVGWAVITDEYKVPSKKFKVLGNTDRHSIKKNLIGALLFDSGETAEATRLKRTARRRYTRRKNRICYLQEIFSNEMAKVDDSFFHRLEESFLVEEDKKHERHPIFGNIVDEVAYHEKYPTIYHLRKKLVDSTDKADLRLIYLALAHMIKFRGHFLIEGDLNPDNSDVDKLFIQLVQTYNQLFEENPINASGVDAKAILSARLSKSRRLENLIAQLPGEKKNGLFGNLIALSLGLTPNFKSNFDLAEDAKLQLSKDTYDDDLDNLLAQIGDQYADLFLAAKNLSDAILLSDILRVNTEITKAPLSASMIKRYDEHHQDLTLLKALVRQQLPEKYKEIFFDQSKNGYAGYIDGGASQEEFYKFIKPILEKMDGTEELLVKLNREDLLRKQRTFDNGSIPHQIHLGELHAILRRQEDFYPFLKDNREKIEKILTFRIPYYVGPLARGNSRFAWMTRKSEETITPWNFEEVVDKGASAQSFIERMTNFDKNLPNEKVLPKHSLLYEYFTVYNELTKVKYVTEGMRKPAFLSGEQKKAIVDLLFKTNRKVTVKQLKEDYFKKIECFDSVEISGVEDRFNASLGTYHDLLKIIKDKDFLDNEENEDILEDIVLTLTLFEDREMIEERLKTYAHLFDDKVMKQLKRRRYTGWGRLSRKLINGIRDKQSGKTILDFLKSDGFANRNFMQLIHDDSLTFKEDIQKAQVSGQGDSLHEHIANLAGSPAIKKGILQTVKVVDELVKVMGRHKPENIVIEMARENQTTQKGQKNSRERMKRIEEGIKELGSQILKEHPVENTQLQNEKLYLYYLQNGRDMYVDQELDINRLSDYDVDHIVPQSFLKDDSIDNKVLTRSDKNRGKSDNVPSEEVVKKMKNYWRQLLNAKLITQRKFDNLTKAERGGLSELDKAGFIKRQLVETRQITKHVAQILDSRMNTKYDENDKLIREVKVITLKSKLVSDFRKDFQFYKVREINNYHHAHDAYLNAVVGTALIKKYPKGSSGSETPGTSESATPESSGSEVEFSHEYWMRHALTLAKRARDEREVPVGAVLVLNNRVIGEGWNRAIGLHDPTAHAEIMALRQGGLVMQNYRLIDATLYVTFEPCVMCAGAMIHSRIGRVVFGVRNAKTGAAGSLMDVLHYPGMNHRVEITEGILADECAALLCYFFRMPRQLESEFVYGDYKVYDVRKMIAKSEQEIGKATAKYFFYSNIMNFFKTEITLANGEIRKRPLIETNGETGEIVWDKGRDFATVRKVLSMPQVNIVKKTEVQTGGFSKESILPKRNSDKLIARKKDWDPKKYGGFDSPTVAYSVLVVAKVEKGKSKKLKSVKELLGITIMERSSFEKNPIDFLEAKGYKEVKKDLIIKLPKYSLFELENGRKRMLASAGELQKGNELALPSKYVNFLYLASHYEKLKGSPEDNEQKQLFVEQHKHYLDEIIEQISEFSKRVILADANLDKVLSAYNKHRDKPIREQAENIIHLFTLTNLGAPAAFKYFDTTIDRKRYTSTKEVLDATLIHQSITGLYETRIDLSQLGGD

SEQ ID NO: 287 - protein, 1541 aa, synthetic construct
  REGION 1..1541: note = 115.2 Cas9 TadAins 1005 polypeptide sequence
MDKKYSIGLAIGTNSVGWAVITDEYKVPSKKFKVLGNTDRHSIKKNLIGALLFDSGETAEATRLKRTARRRYTRRKNRICYLQEIFSNEMAKVDDSFFHRLEESFLVEEDKKHERHPIFGNIVDEVAYHEKYPTIYHLRKKLVDSTDKADLRLIYLALAHMIKFRGHFLIEGDLNPDNSDVDKLFIQLVQTYNQLFEENPINASGVDAKAILSARLSKSRRLENLIAQLPGEKKNGLFGNLIALSLGLTPNFKSNFDLAEDAKLQLSKDTYDDDLDNLLAQIGDQYADLFLAAKNLSDAILLSDILRVNTEITKAPLSASMIKRYDEHHQDLTLLKALVRQQLPEKYKEIFFDQSKNGYAGYIDGGASQEEFYKFIKPILEKMDGTEELLVKLNREDLLRKQRTFDNGSIPHQIHLGELHAILRRQEDFYPFLKDNREKIEKILTFRIPYYVGPLARGNSRFAWMTRKSEETITPWNFEEVVDKGASAQSFIERMTNFDKNLPNEKVLPKHSLLYEYFTVYNELTKVKYVTEGMRKPAFLSGEQKKAIVDLLFKTNRKVTVKQLKEDYFKKIECFDSVEISGVEDRFNASLGTYHDLLKIIKDKDFLDNEENEDILEDIVLTLTLFEDREMIEERLKTYAHLFDDKVMKQLKRRRYTGWGRLSRKLINGIRDKQSGKTILDFLKSDGFANRNFMQLIHDDSLTFKEDIQKAQVSGQGDSLHEHIANLAGSPAIKKGILQTVKVVDELVKVMGRHKPENIVIEMARENQTTQKGQKNSRERMKRIEEGIKELGSQILKEHPVENTQLQNEKLYLYYLQNGRDMYVDQELDINRLSDYDVDHIVPQSFLKDDSIDNKVLTRSDKNRGKSDNVPSEEVVKKMKNYWRQLLNAKLITQRKFDNLTKAERGGLSELDKAGFIKRQLVETRQITKHVAQILDSRMNTKYDENDKLIREVKVITLKSKLVSDFRKDFQFYKVREINNYHHAHDAYLNAVVGTALIKKYPKLGSSGSETPGTSESATPESSGSEVEFSHEYWMRHALTLAKRARDEREVPVGAVLVLNNRVIGEGWNRAIGLHDPTAHAEIMALRQGGLVMQNYRLIDATLYVTFEPCVMCAGAMIHSRIGRVVFGVRNAKTGAAGSLMDVLHYPGMNHRVEITEGILADECAALLCYFFRMPRQESEFVYGDYKVYDVRKMIAKSEQEIGKATAKYFFYSNIMNFFKTEITLANGEIRKRPLIETNGETGEIVWDKGRDFATVRKVLSMPQVNIVKKTEVQTGGFSKESILPKRNSDKLIARKKDWDPKKYGGFDSPTVAYSVLVVAKVEKGKSKKLKSVKELLGITIMERSSFEKNPIDFLEAKGYKEVKKDLIIKLPKYSLFELENGRKRMLASAGELQKGNELALPSKYVNFLYLASHYEKLKGSPEDNEQKQLFVEQHKHYLDEIIEQISEFSKRVILADANLDKVLSAYNKHRDKPIREQAENIIHLFTLTNLGAPAAFKYFDTTIDRKRYTSTKEVLDATLIHQSITGLYETRIDLSQLGGD

SEQ ID NO: 288 - protein, 1541 aa, synthetic construct
  REGION 1..1541: note = 115.3 Cas9 TadAins 1006 polypeptide sequence
MDKKYSIGLAIGTNSVGWAVITDEYKVPSKKFKVLGNTDRHSIKKNLIGALLFDSGETAEATRLKRTARRRYTRRKNRICYLQEIFSNEMAKVDDSFFHRLEESFLVEEDKKHERHPIFGNIVDEVAYHEKYPTIYHLRKKLVDSTDKADLRLIYLALAHMIKFRGHFLIEGDLNPDNSDVDKLFIQLVQTYNQLFEENPINASGVDAKAILSARLSKSRRLENLIAQLPGEKKNGLFGNLIALSLGLTPNFKSNFDLAEDAKLQLSKDTYDDDLDNLLAQIGDQYADLFLAAKNLSDAILLSDILRVNTEITKAPLSASMIKRYDEHHQDLTLLKALVRQQLPEKYKEIFFDQSKNGYAGYIDGGASQEEFYKFIKPILEKMDGTEELLVKLNREDLLRKQRTFDNGSIPHQIHLGELHAILRRQEDFYPFLKDNREKIEKILTFRIPYYVGPLARGNSRFAWMTRKSEETITPWNFEEVVDKGASAQSFIERMTNFDKNLPNEKVLPKHSLLYEYFTVYNELTKVKYVTEGMRKPAFLSGEQKKAIVDLLFKTNRKVTVKQLKEDYFKKIECFDSVEISGVEDRFNASLGTYHDLLKIIKDKDFLDNEENEDILEDIVLTLTLFEDREMIEERLKTYAHLFDDKVMKQLKRRRYTGWGRLSRKLINGIRDKQSGKTILDFLKSDGFANRNFMQLIHDDSLTFKEDIQKAQVSGQGDSLHEHIANLAGSPAIKKGILQTVKVVDELVKVMGRHKPENIVIEMARENQTTQKGQKNSRERMKRIEEGIKELGSQILKEHPVENTQLQNEKLYLYYLQNGRDMYVDQELDINRLSDYDVDHIVPQSFLKDDSIDNKVLTRSDKNRGKSDNVPSEEVVKKMKNYWRQLLNAKLITQRKFDNLTKAERGGLSELDKAGFIKRQLVETRQITKHVAQILDSRMNTKYDENDKLIREVKVITLKSKLVSDFRKDFQFYKVREINNYHHAHDAYLNAVVGTALIKKYPKLEGSSGSETPGTSESATPESSGSEVEFSHEYWMRHALTLAKRARDEREVPVGAVLVLNNRVIGEGWNRAIGLHDPTAHAEIMALRQGGLVMQNYRLIDATLYVTFEPCVMCAGAMIHSRIGRVVFGVRNAKTGAAGSLMDVLHYPGMNHRVEITEGILADECAALLCYFFRMPRQSEFVYGDYKVYDVRKMIAKSEQEIGKATAKYFFYSNIMNFFKTEITLANGEIRKRPLIETNGETGEIVWDKGRDFATVRKVLSMPQVNIVKKTEVQTGGFSKESILPKRNSDKLIARKKDWDPKKYGGFDSPTVAYSVLVVAKVEKGKSKKLKSVKELLGITIMERSSFEKNPIDFLEAKGYKEVKKDLIIKLPKYSLFELENGRKRMLASAGELQKGNELALPSKYVNFLYLASHYEKLKGSPEDNEQKQLFVEQHKHYLDEIIEQISEFSKRVILADANLDKVLSAYNKHRDKPIREQAENIIHLFTLTNLGAPAAFKYFDTTIDRKRYTSTKEVLDATLIHQSITGLYETRIDLSQLGGD

SEQ ID NO: 289 - protein, 1541 aa, synthetic construct
  REGION 1..1541: note = 115.4 Cas9 TadAins 1007 polypeptide sequence
MDKKYSIGLAIGTNSVGWAVITDEYKVPSKKFKVLGNTDRHSIKKNLIGALLFDSGETAEATRLKRTARRRYTRRKNRICYLQEIFSNEMAKVDDSFFHRLEESFLVEEDKKHERHPIFGNIVDEVAYHEKYPTIYHLRKKLVDSTDKADLRLIYLALAHMIKFRGHFLIEGDLNPDNSDVDKLFIQLVQTYNQLFEENPINASGVDAKAILSARLSKSRRLENLIAQLPGEKKNGLFGNLIALSLGLTPNFKSNFDLAEDAKLQLSKDTYDDDLDNLLAQIGDQYADLFLAAKNLSDAILLSDILRVNTEITKAPLSASMIKRYDEHHQDLTLLKALVRQQLPEKYKEIFFDQSKNGYAGYIDGGASQEEFYKFIKPILEKMDGTEELLVKLNREDLLRKQRTFDNGSIPHQIHLGELHAILRRQEDFYPFLKDNREKIEKILTFRIPYYVGPLARGNSRFAWMTRKSEETITPWNFEEVVDKGASAQSFIERMTNFDKNLPNEKVLPKHSLLYEYFTVYNELTKVKYVTEGMRKPAFLSGEQKKAIVDLLFKTNRKVTVKQLKEDYFKKIECFDSVEISGVEDRFNASLGTYHDLLKIIKDKDFLDNEENEDILEDIVLTLTLFEDREMIEERLKTYAHLFDDKVMKQLKRRRYTGWGRLSRKLINGIRDKQSGKTILDFLKSDGFANRNFMQLIHDDSLTFKEDIQKAQVSGQGDSLHEHIANLAGSPAIKKGILQTVKVVDELVKVMGRHKPENIVIEMARENQTTQKGQKNSRERMKRIEEGIKELGSQILKEHPVENTQLQNEKLYLYYLQNGRDMYVDQELDINRLSDYDVDHIVPQSFLKDDSIDNKVLTRSDKNRGKSDNVPSEEVVKKMKNYWRQLLNAKLITQRKFDNLTKAERGGLSELDKAGFIKRQLVETRQITKHVAQILDSRMNTKYDENDKLIREVKVITLKSKLVSDFRKDFQFYKVREINNYHHAHDAYLNAVVGTALIKKYPKLESGSSGSETPGTSESATPESSGSEVEFSHEYWMRHALTLAKRARDEREVPVGAVLVLNNRVIGEGWNRAIGLHDPTAHAEIMALRQGGLVMQNYRLIDATLYVTFEPCVMCAGAMIHSRIGRVVFGVRNAKTGAAGSLMDVLHYPGMNHRVEITEGILADECAALLCYFFRMPRQEFVYGDYKVYDVRKMIAKSEQEIGKATAKYFFYSNIMNFFKTEITLANGEIRKRPLIETNGETGEIVWDKGRDFATVRKVLSMPQVNIVKKTEVQTGGFSKESILPKRNSDKLIARKKDWDPKKYGGFDSPTVAYSVLVVAKVEKGKSKKLKSVKELLGITIMERSSFEKNPIDFLEAKGYKEVKKDLIIKLPKYSLFELENGRKRMLASAGELQKGNELALPSKYVNFLYLASHYEKLKGSPEDNEQKQLFVEQHKHYLDEIIEQISEFSKRVILADANLDKVLSAYNKHRDKPIREQAENIIHLFTLTNLGAPAAFKYFDTTIDRKRYTSTKEVLDATLIHQSITGLYETRIDLSQLGGD

SEQ ID NO: 290 - protein, 1541 aa, synthetic construct
  REGION 1..1541: note = 116.1 Cas9 TadAins C-term truncate 792 polypeptide sequence
MDKKYSIGLAIGTNSVGWAVITDEYKVPSKKFKVLGNTDRHSIKKNLIGALLFDSGETAEATRLKRTARRRYTRRKNRICYLQEIFSNEMAKVDDSFFHRLEESFLVEEDKKHERHPIFGNIVDEVAYHEKYPTIYHLRKKLVDSTDKADLRLIYLALAHMIKFRGHFLIEGDLNPDNSDVDKLFIQLVQTYNQLFEENPINASGVDAKAILSARLSKSRRLENLIAQLPGEKKNGLFGNLIALSLGLTPNFKSNFDLAEDAKLQLSKDTYDDDLDNLLAQIGDQYADLFLAAKNLSDAILLSDILRVNTEITKAPLSASMIKRYDEHHQDLTLLKALVRQQLPEKYKEIFFDQSKNGYAGYIDGGASQEEFYKFIKPILEKMDGTEELLVKLNREDLLRKQRTFDNGSIPHQIHLGELHAILRRQEDFYPFLKDNREKIEKILTFRIPYYVGPLARGNSRFAWMTRKSEETITPWNFEEVVDKGASAQSFIERMTNFDKNLPNEKVLPKHSLLYEYFTVYNELTKVKYVTEGMRKPAFLSGEQKKAIVDLLFKTNRKVTVKQLKEDYFKKIECFDSVEISGVEDRFNASLGTYHDLLKIIKDKDFLDNEENEDILEDIVLTLTLFEDREMIEERLKTYAHLFDDKVMKQLKRRRYTGWGRLSRKLINGIRDKQSGKTILDFLKSDGFANRNFMQLIHDDSLTFKEDIQKAQVSGQGDSLHEHIANLAGSPAIKKGILQTVKVVDELVKVMGRHKPENIVIEMARENQTTQKGQKNSRERMKRIEEGIKELGGSSGSETPGTSESATPESSGSEVEFSHEYWMRHALTLAKRARDEREVPVGAVLVLNNRVIGEGWNRAIGLHDPTAHAEIMALRQGGLVMQNYRLIDATLYVTFEPCVMCAGAMIHSRIGRVVFGVRNAKTGAAGSLMDVLHYPGMNHRVEITEGILADECAALLCYFFRMPRQSQILKEHPVENTQLQNEKLYLYYLQNGRDMYVDQELDINRLSDYDVDHIVPQSFLKDDSIDNKVLTRSDKNRGKSDNVPSEEVVKKMKNYWRQLLNAKLITQRKFDNLTKAERGGLSELDKAGFIKRQLVETRQITKHVAQILDSRMNTKYDENDKLIREVKVITLKSKLVSDFRKDFQFYKVREINNYHHAHDAYLNAVVGTALIKKYPKLESEFVYGDYKVYDVRKMIAKSEQEIGKATAKYFFYSNIMNFFKTEITLANGEIRKRPLIETNGETGEIVWDKGRDFATVRKVLSMPQVNIVKKTEVQTGGFSKESILPKRNSDKLIARKKDWDPKKYGGFDSPTVAYSVLVVAKVEKGKSKKLKSVKELLGITIMERSSFEKNPIDFLEAKGYKEVKKDLIIKLPKYSLFELENGRKRMLASAGELQKGNELALPSKYVNFLYLASHYEKLKGSPEDNEQKQLFVEQHKHYLDEIIEQISEFSKRVILADANLDKVLSAYNKHRDKPIREQAENIIHLFTLTNLGAPAAFKYFDTTIDRKRYTSTKEVLDATLIHQSITGLYETRIDLSQLGGD

SEQ ID NO: 291 - protein, 1541 aa, synthetic construct
  REGION 1..1541: note = 116.2 Cas9 TadAins C-term truncate 791 polypeptide sequence
MDKKYSIGLAIGTNSVGWAVITDEYKVPSKKFKVLGNTDRHSIKKNLIGALLFDSGETAEATRLKRTARRRYTRRKNRICYLQEIFSNEMAKVDDSFFHRLEESFLVEEDKKHERHPIFGNIVDEVAYHEKYPTIYHLRKKLVDSTDKADLRLIYLALAHMIKFRGHFLIEGDLNPDNSDVDKLFIQLVQTYNQLFEENPINASGVDAKAILSARLSKSRRLENLIAQLPGEKKNGLFGNLIALSLGLTPNFKSNFDLAEDAKLQLSKDTYDDDLDNLLAQIGDQYADLFLAAKNLSDAILLSDILRVNTEITKAPLSASMIKRYDEHHQDLTLLKALVRQQLPEKYKEIFFDQSKNGYAGYIDGGASQEEFYKFIKPILEKMDGTEELLVKLNREDLLRKQRTFDNGSIPHQIHLGELHAILRRQEDFYPFLKDNREKIEKILTFRIPYYVGPLARGNSRFAWMTRKSEETITPWNFEEVVDKGASAQSFIERMTNFDKNLPNEKVLPKHSLLYEYFTVYNELTKVKYVTEGMRKPAFLSGEQKKAIVDLLFKTNRKVTVKQLKEDYFKKIECFDSVEISGVEDRFNASLGTYHDLLKIIKDKDFLDNEENEDILEDIVLTLTLFEDREMIEERLKTYAHLFDDKVMKQLKRRRYTGWGRLSRKLINGIRDKQSGKTILDFLKSDGFANRNFMQLIHDDSLTFKEDIQKAQVSGQGDSLHEHIANLAGSPAIKKGILQTVKVVDELVKVMGRHKPENIVIEMARENQTTQKGQKNSRERMKRIEEGIKELGSSGSETPGTSESATPESSGSEVEFSHEYWMRHALTLAKRARDEREVPVGAVLVLNNRVIGEGWNRAIGLHDPTAHAEIMALRQGGLVMQNYRLIDATLYVTFEPCVMCAGAMIHSRIGRVVFGVRNAKTGAAGSLMDVLHYPGMNHRVEITEGILADECAALLCYFFRMPRQGSQILKEHPVENTQLQNEKLYLYYLQNGRDMYVDQELDINRLSDYDVDHIVPQSFLKDDSIDNKVLTRSDKNRGKSDNVPSEEVVKKMKNYWRQLLNAKLITQRKFDNLTKAERGGLSELDKAGFIKRQLVETRQITKHVAQILDSRMNTKYDENDKLIREVKVITLKSKLVSDFRKDFQFYKVREINNYHHAHDAYLNAVVGTALIKKYPKLESEFVYGDYKVYDVRKMIAKSEQEIGKATAKYFFYSNIMNFFKTEITLANGEIRKRPLIETNGETGEIVWDKGRDFATVRKVLSMPQVNIVKKTEVQTGGFSKESILPKRNSDKLIARKKDWDPKKYGGFDSPTVAYSVLVVAKVEKGKSKKLKSVKELLGITIMERSSFEKNPIDFLEAKGYKEVKKDLIIKLPKYSLFELENGRKRMLASAGELQKGNELALPSKYVNFLYLASHYEKLKGSPEDNEQKQLFVEQHKHYLDEIIEQISEFSKRVILADANLDKVLSAYNKHRDKPIREQAENIIHLFTLTNLGAPAAFKYFDTTIDRKRYTSTKEVLDATLIHQSITGLYETRIDLSQLGGD

SEQ ID NO: 292 - protein, 1541 aa, synthetic construct
  REGION 1..1541: note = 116.3 Cas9 TadAins C-term truncate 790 polypeptide sequence
MDKKYSIGLAIGTNSVGWAVITDEYKVPSKKFKVLGNTDRHSIKKNLIGALLFDSGETAEATRLKRTARRRYTRRKNRICYLQEIFSNEMAKVDDSFFHRLEESFLVEEDKKHERHPIFGNIVDEVAYHEKYPTIYHLRKKLVDSTDKADLRLIYLALAHMIKFRGHFLIEGDLNPDNSDVDKLFIQLVQTYNQLFEENPINASGVDAKAILSARLSKSRRLENLIAQLPGEKKNGLFGNLIALSLGLTPNFKSNFDLAEDAKLQLSKDTYDDDLDNLLAQIGDQYADLFLAAKNLSDAILLSDILRVNTEITKAPLSASMIKRYDEHHQDLTLLKALVRQQLPEKYKEIFFDQSKNGYAGYIDGGASQEEFYKFIKPILEKMDGTEELLVKLNREDLLRKQRTFDNGSIPHQIHLGELHAILRRQEDFYPFLKDNREKIEKILTFRIPYYVGPLARGNSRFAWMTRKSEETITPWNFEEVVDKGASAQSFIERMTNFDKNLPNEKVLPKHSLLYEYFTVYNELTKVKYVTEGMRKPAFLSGEQKKAIVDLLFKTNRKVTVKQLKEDYFKKIECFDSVEISGVEDRFNASLGTYHDLLKIIKDKDFLDNEENEDILEDIVLTLTLFEDREMIEERLKTYAHLFDDKVMKQLKRRRYTGWGRLSRKLINGIRDKQSGKTILDFLKSDGFANRNFMQLIHDDSLTFKEDIQKAQVSGQGDSLHEHIANLAGSPAIKKGILQTVKVVDELVKVMGRHKPENIVIEMARENQTTQKGQKNSRERMKRIEEGIKEGSSGSETPGTSESATPESSGSEVEFSHEYWMRHALTLAKRARDEREVPVGAVLVLNNRVIGEGWNRAIGLHDPTAHAEIMALRQGGLVMQNYRLIDATLYVTFEPCVMCAGAMIHSRIGRVVFGVRNAKTGAAGSLMDVLHYPGMNHRVEITEGILADECAALLCYFFRMPRQLGSQILKEHPVENTQLQNEKLYLYYLQNGRDMYVDQELDINRLSDYDVDHIVPQSFLKDDSIDNKVLTRSDKNRGKSDNVPSEEVVKKMKNYWRQLLNAKLITQRKFDNLTKAERGGLSELDKAGFIKRQLVETRQITKHVAQILDSRMNTKYDENDKLIREVKVITLKSKLVSDFRKDFQFYKVREINNYHHAHDAYLNAVVGTALIKKYPKLESEFVYGDYKVYDVRKMIAKSEQEIGKATAKYFFYSNIMNFFKTEITLANGEIRKRPLIETNGETGEIVWDKGRDFATVRKVLSMPQVNIVKKTEVQTGGFSKESILPKRNSDKLIARKKDWDPKKYGGFDSPTVAYSVLVVAKVEKGKSKKLKSVKELLGITIMERSSFEKNPIDFLEAKGYKEVKKDLIIKLPKYSLFELENGRKRMLASAGELQKGNELALPSKYVNFLYLASHYEKLKGSPEDNEQKQLFVEQHKHYLDEIIEQISEFSKRVILADANLDKVLSAYNKHRDKPIREQAENIIHLFTLTNLGAPAAFKYFDTTIDRKRYTSTKEVLDATLIHQSITGLYETRIDLSQLGGD

SEQ ID NO: 293 - protein, 1484 aa, synthetic construct
  REGION 1..1484: note = 117 Cas9 delta 1017-1069 polypeptide sequence
MDKKYSIGLAIGTNSVGWAVITDEYKVPSKKFKVLGNTDRHSIKKNLIGALLFDSGETAEATRLKRTARRRYTRRKNRICYLQEIFSNEMAKVDDSFFHRLEESFLVEEDKKHERHPIFGNIVDEVAYHEKYPTIYHLRKKLVDSTDKADLRLIYLALAHMIKFRGHFLIEGDLNPDNSDVDKLFIQLVQTYNQLFEENPINASGVDAKAILSARLSKSRRLENLIAQLPGEKKNGLFGNLIALSLGLTPNFKSNFDLAEDAKLQLSKDTYDDDLDNLLAQIGDQYADLFLAAKNLSDAILLSDILRVNTEITKAPLSASMIKRYDEHHQDLTLLKALVRQQLPEKYKEIFFDQSKNGYAGYIDGGASQEEFYKFIKPILEKMDGTEELLVKLNREDLLRKQRTFDNGSIPHQIHLGELHAILRRQEDFYPFLKDNREKIEKILTFRIPYYVGPLARGNSRFAWMTRKSEETITPWNFEEVVDKGASAQSFIERMTNFDKNLPNEKVLPKHSLLYEYFTVYNELTKVKYVTEGMRKPAFLSGEQKKAIVDLLFKTNRKVTVKQLKEDYFKKIECFDSVEISGVEDRFNASLGTYHDLLKIIKDKDFLDNEENEDILEDIVLTLTLFEDREMIEERLKTYAHLFDDKVMKQLKRRRYTGWGRLSRKLINGIRDKQSGKTILDFLKSDGFANRNFMQLIHDDSLTFKEDIQKAQVSGQGDSLHEHIANLAGSPAIKKGILQTVKVVDELVKVMGRHKPENIVIEMARENQTTQKGQKNSRERMKRIEEGIKELGSQILKEHPVENTQLQNEKLYLYYLQNGRDMYVDQELDINRLSDYDVDHIVPQSFLKDDSIDNKVLTRSDKNRGKSDNVPSEEVVKKMKNYWRQLLNAKLITQRKFDNLTKAERGGLSELDKAGFIKRQLVETRQITKHVAQILDSRMNTKYDENDKLIREVKVITLKSKLVSDFRKDFQFYKVREINNYHHAHDAYLNAVVGTALIKKYPKLESEFVYGDYKVYSSGSEVEFSHEYWMRHALTLAKRARDEREVPVGAVLVLNNRVIGEGWNRAIGLHDPTAHAEIMALRQGGLVMQNYRLIDATLYVTFEPCVMCAGAMIHSRIGRVVFGVRNAKTGAAGSLMDVLHYPGMNHRVEITEGILADECAALLCYFFRMPRQVFNAQKKAQSSTDGEIVWDKGRDFATVRKVLSMPQVNIVKKTEVQTGGFSKESILPKRNSDKLIARKKDWDPKKYGGFDSPTVAYSVLVVAKVEKGKSKKLKSVKELLGITIMERSSFEKNPIDFLEAKGYKEVKKDLIIKLPKYSLFELENGRKRMLASAGELQKGNELALPSKYVNFLYLASHYEKLKGSPEDNEQKQLFVEQHKHYLDEIIEQISEFSKRVILADANLDKVLSAYNKHRDKPIREQAENIIHLFTLTNLGAPAAFKYFDTTIDRKRYTSTKEVLDATLIHQSITGLYETRIDLSQLGGD

SEQ ID NO: 294 - protein, 1554 aa, synthetic construct
  REGION 1..1554: note = 118 Cas9 TadA-CP116ins 1067 polypeptide sequence
MDKKYSIGLAIGTNSVGWAVITDEYKVPSKKFKVLGNTDRHSIKKNLIGALLFDSGETAEATRLKRTARRRYTRRKNRICYLQEIFSNEMAKVDDSFFHRLEESFLVEEDKKHERHPIFGNIVDEVAYHEKYPTIYHLRKKLVDSTDKADLRLIYLALAHMIKFRGHFLIEGDLNPDNSDVDKLFIQLVQTYNQLFEENPINASGVDAKAILSARLSKSRRLENLIAQLPGEKKNGLFGNLIALSLGLTPNFKSNFDLAEDAKLQLSKDTYDDDLDNLLAQIGDQYADLFLAAKNLSDAILLSDILRVNTEITKAPLSASMIKRYDEHHQDLTLLKALVRQQLPEKYKEIFFDQSKNGYAGYIDGGASQEEFYKFIKPILEKMDGTEELLVKLNREDLLRKQRTFDNGSIPHQIHLGELHAILRRQEDFYPFLKDNREKIEKILTFRIPYYVGPLARGNSRFAWMTRKSEETITPWNFEEVVDKGASAQSFIERMTNFDKNLPNEKVLPKHSLLYEYFTVYNELTKVKYVTEGMRKPAFLSGEQKKAIVDLLFKTNRKVTVKQLKEDYFKKIECFDSVEISGVEDRFNASLGTYHDLLKIIKDKDFLDNEENEDILEDIVLTLTLFEDREMIEERLKTYAHLFDDKVMKQLKRRRYTGWGRLSRKLINGIRDKQSGKTILDFLKSDGFANRNFMQLIHDDSLTFKEDIQKAQVSGQGDSLHEHIANLAGSPAIKKGILQTVKVVDELVKVMGRHKPENIVIEMARENQTTQKGQKNSRERMKRIEEGIKELGSQILKEHPVENTQLQNEKLYLYYLQNGRDMYVDQELDINRLSDYDVDHIVPQSFLKDDSIDNKVLTRSDKNRGKSDNVPSEEVVKKMKNYWRQLLNAKLITQRKFDNLTKAERGGLSELDKAGFIKRQLVETRQITKHVAQILDSRMNTKYDENDKLIREVKVITLKSKLVSDFRKDFQFYKVREINNYHHAHDAYLNAVVGTALIKKYPKLESEFVYGDYKVYDVRKMIAKSEQEIGKATAKYFFYSNIMNFFKTEITLANGEIRKRPLIETNMNHRVEITEGILADECAALLCYFFRMPRQVFNAQKKAQSSTDGSSGSETPGTSESATPESSGSEVEFSHEYWMRHALTLAKRARDEREVPVGAVLVLNNRVIGEGWNRAIGLHDPTAHAEIMALRQGGLVMQNYRLIDATLYVTFEPCVMCAGAMIHSRIGRVVFGVRNAKTGAAGSLMDVLHYPGGETGEIVWDKGRDFATVRKVLSMPQVNIVKKTEVQTGGFSKESILPKRNSDKLIARKKDWDPKKYGGFDSPTVAYSVLVVAKVEKGKSKKLKSVKELLGITIMERSSFEKNPIDFLEAKGYKEVKKDLIIKLPKYSLFELENGRKRMLASAGELQKGNELALPSKYVNFLYLASHYEKLKGSPEDNEQKQLFVEQHKHYLDEIIEQISEFSKRVILADANLDKVLSAYNKHRDKPIREQAENIIHLFTLTNLGAPAAFKYFDTTIDRKRYTSTKEVLDATLIHQSITGLYETRIDLSQLGGD

SEQ ID NO: 295 - protein, 1554 aa, synthetic construct
  REGION 1..1554: note = 119 Cas9 TadAins 701 polypeptide sequence
MDKKYSIGLAIGTNSVGWAVITDEYKVPSKKFKVLGNTDRHSIKKNLIGALLFDSGETAEATRLKRTARRRYTRRKNRICYLQEIFSNEMAKVDDSFFHRLEESFLVEEDKKHERHPIFGNIVDEVAYHEKYPTIYHLRKKLVDSTDKADLRLIYLALAHMIKFRGHFLIEGDLNPDNSDVDKLFIQLVQTYNQLFEENPINASGVDAKAILSARLSKSRRLENLIAQLPGEKKNGLFGNLIALSLGLTPNFKSNFDLAEDAKLQLSKDTYDDDLDNLLAQIGDQYADLFLAAKNLSDAILLSDILRVNTEITKAPLSASMIKRYDEHHQDLTLLKALVRQQLPEKYKEIFFDQSKNGYAGYIDGGASQEEFYKFIKPILEKMDGTEELLVKLNREDLLRKQRTFDNGSIPHQIHLGELHAILRRQEDFYPFLKDNREKIEKILTFRIPYYVGPLARGNSRFAWMTRKSEETITPWNFEEVVDKGASAQSFIERMTNFDKNLPNEKVLPKHSLLYEYFTVYNELTKVKYVTEGMRKPAFLSGEQKKAIVDLLFKTNRKVTVKQLKEDYFKKIECFDSVEISGVEDRFNASLGTYHDLLKIIKDKDFLDNEENEDILEDIVLTLTLFEDREMIEERLKTYAHLFDDKVMKQLKRRRYTGWGRLSRKLINGIRDKQSGKTILDFLKSDGFANRNFMQLIHDDSGSSGSETPGTSESATPESSGSEVEFSHEYWMRHALTLAKRARDEREVPVGAVLVLNNRVIGEGWNRAIGLHDPTAHAEIMALRQGGLVMQNYRLIDATLYVTFEPCVMCAGAMIHSRIGRVVFGVRNAKTGAAGSLMDVLHYPGMNHRVEITEGILADECAALLCYFFRMPRQVFNAQKKAQSSTDLTFKEDIQKAQVSGQGDSLHEHIANLAGSPAIKKGILQTVKVVDELVKVMGRHKPENIVIEMARENQTTQKGQKNSRERMKRIEEGIKELGSQILKEHPVENTQLQNEKLYLYYLQNGRDMYVDQELDINRLSDYDVDHIVPQSFLKDDSIDNKVLTRSDKNRGKSDNVPSEEVVKKMKNYWRQLLNAKLITQRKFDNLTKAERGGLSELDKAGFIKRQLVETRQITKHVAQILDSRMNTKYDENDKLIREVKVITLKSKLVSDFRKDFQFYKVREINNYHHAHDAYLNAVVGTALIKKYPKLESEFVYGDYKVYDVRKMIAKSEQEIGKATAKYFFYSNIMNFFKTEITLANGEIRKRPLIETNGETGEIVWDKGRDFATVRKVLSMPQVNIVKKTEVQTGGFSKESILPKRNSDKLIARKKDWDPKKYGGFDSPTVAYSVLVVAKVEKGKSKKLKSVKELLGITIMERSSFEKNPIDFLEAKGYKEVKKDLIIKLPKYSLFELENGRKRMLASAGELQKGNELALPSKYVNFLYLASHYEKLKGSPEDNEQKQLFVEQHKHYLDEIIEQISEFSKRVILADANLDKVLSAYNKHRDKPIREQAENIIHLFTLTNLGAPAAFKYFDTTIDRKRYTSTKEVLDATLIHQSITGLYETRIDLSQLGGD

SEQ ID NO: 296 - protein, 1554 aa, synthetic construct
  REGION 1..1554: note = 120 Cas9 TadACP136ins 1248 polypeptide sequence
MDKKYSIGLAIGTNSVGWAVITDEYKVPSKKFKVLGNTDRHSIKKNLIGALLFDSGETAEATRLKRTARRRYTRRKNRICYLQEIFSNEMAKVDDSFFHRLEESFLVEEDKKHERHPIFGNIVDEVAYHEKYPTIYHLRKKLVDSTDKADLRLIYLALAHMIKFRGHFLIEGDLNPDNSDVDKLFIQLVQTYNQLFEENPINASGVDAKAILSARLSKSRRLENLIAQLPGEKKNGLFGNLIALSLGLTPNFKSNFDLAEDAKLQLSKDTYDDDLDNLLAQIGDQYADLFLAAKNLSDAILLSDILRVNTEITKAPLSASMIKRYDEHHQDLTLLKALVRQQLPEKYKEIFFDQSKNGYAGYIDGGASQEEFYKFIKPILEKMDGTEELLVKLNREDLLRKQRTFDNGSIPHQIHLGELHAILRRQEDFYPFLKDNREKIEKILTFRIPYYVGPLARGNSRFAWMTRKSEETITPWNFEEVVDKGASAQSFIERMTNFDKNLPNEKVLPKHSLLYEYFTVYNELTKVKYVTEGMRKPAFLSGEQKKAIVDLLFKTNRKVTVKQLKEDYFKKIECFDSVEISGVEDRFNASLGTYHDLLKIIKDKDFLDNEENEDILEDIVLTLTLFEDREMIEERLKTYAHLFDDKVMKQLKRRRYTGWGRLSRKLINGIRDKQSGKTILDFLKSDGFANRNFMQLIHDDSLTFKEDIQKAQVSGQGDSLHEHIANLAGSPAIKKGILQTVKVVDELVKVMGRHKPENIVIEMARENQTTQKGQKNSRERMKRIEEGIKELGSQILKEHPVENTQLQNEKLYLYYLQNGRDMYVDQELDINRLSDYDVDHIVPQSFLKDDSIDNKVLTRSDKNRGKSDNVPSEEVVKKMKNYWRQLLNAKLITQRKFDNLTKAERGGLSELDKAGFIKRQLVETRQITKHVAQILDSRMNTKYDENDKLIREVKVITLKSKLVSDFRKDFQFYKVREINNYHHAHDAYLNAVVGTALIKKYPKLESEFVYGDYKVYDVRKMIAKSEQEIGKATAKYFFYSNIMNFFKTEITLANGEIRKRPLIETNGETGEIVWDKGRDFATVRKVLSMPQVNIVKKTEVQTGGFSKESILPKRNSDKLIARKKDWDPKKYGGFDSPTVAYSVLVVAKVEKGKSKKLKSVKELLGITIMERSSFEKNPIDFLEAKGYKEVKKDLIIKLPKYSLFELENGRKRMLASAGELQKGNELALPSKYVNFLYLASHYEKLKGSMNHRVEITEGILADECAALLCYFFRMPRQVFNAQKKAQSSTDGSSGSETPGTSESATPESSGSEVEFSHEYWMRHALTLAKRARDEREVPVGAVLVLNNRVIGEGWNRAIGLHDPTAHAEIMALRQGGLVMQNYRLIDATLYVTFEPCVMCAGAMIHSRIGRVVFGVRNAKTGAAGSLMDVLHYPGPEDNEQKQLFVEQHKHYLDEIIEQISEFSKRVILADANLDKVLSAYNKHRDKPIREQAENIIHLFTLTNLGAPAAFKYFDTTIDRKRYTSTKEVLDATLIHQSITGLYETRIDLSQLGGD

SEQ ID NO: 297 - protein, 1554 aa, synthetic construct
  REGION 1..1554: note = 121 Cas9 TadACP136ins 1052 polypeptide sequence
MDKKYSIGLAIGTNSVGWAVITDEYKVPSKKFKVLGNTDRHSIKKNLIGALLFDSGETAEATRLKRTARRRYTRRKNRICYLQEIFSNEMAKVDDSFFHRLEESFLVEEDKKHERHPIFGNIVDEVAYHEKYPTIYHLRKKLVDSTDKADLRLIYLALAHMIKFRGHFLIEGDLNPDNSDVDKLFIQLVQTYNQLFEENPINASGVDAKAILSARLSKSRRLENLIAQLPGEKKNGLFGNLIALSLGLTPNFKSNFDLAEDAKLQLSKDTYDDDLDNLLAQIGDQYADLFLAAKNLSDAILLSDILRVNTEITKAPLSASMIKRYDEHHQDLTLLKALVRQQLPEKYKEIFFDQSKNGYAGYIDGGASQEEFYKFIKPILEKMDGTEELLVKLNREDLLRKQRTFDNGSIPHQIHLGELHAILRRQEDFYPFLKDNREKIEKILTFRIPYYVGPLARGNSRFAWMTRKSEETITPWNFEEVVDKGASAQSFIERMTNFDKNLPNEKVLPKHSLLYEYFTVYNELTKVKYVTEGMRKPAFLSGEQKKAIVDLLFKTNRKVTVKQLKEDYFKKIECFDSVEISGVEDRFNASLGTYHDLLKIIKDKDFLDNEENEDILEDIVLTLTLFEDREMIEERLKTYAHLFDDKVMKQLKRRRYTGWGRLSRKLINGIRDKQSGKTILDFLKSDGFANRNFMQLIHDDSLTFKEDIQKAQVSGQGDSLHEHIANLAGSPAIKKGILQTVKVVDELVKVMGRHKPENIVIEMARENQTTQKGQKNSRERMKRIEEGIKELGSQILKEHPVENTQLQNEKLYLYYLQNGRDMYVDQELDINRLSDYDVDHIVPQSFLKDDSIDNKVLTRSDKNRGKSDNVPSEEVVKKMKNYWRQLLNAKLITQRKFDNLTKAERGGLSELDKAGFIKRQLVETRQITKHVAQILDSRMNTKYDENDKLIREVKVITLKSKLVSDFRKDFQFYKVREINNYHHAHDAYLNAVVGTALIKKYPKLESEFVYGDYKVYDVRKMIAKSEQEIGKATAKYFFYSNIMNFFKTEITLAMNHRVEITEGILADECAALLCYFFRMPRQVFNAQKKAQSSTDGSSGSETPGTSESATPESSGSEVEFSHEYWMRHALTLAKRARDEREVPVGAVLVLNNRVIGEGWNRAIGLHDPTAHAEIMALRQGGLVMQNYRLIDATLYVTFEPCVMCAGAMIHSRIGRVVFGVRNAKTGAAGSLMDVLHYPGNGEIRKRPLIETNGETGEIVWDKGRDFATVRKVLSMPQVNIVKKTEVQTGGFSKESILPKRNSDKLIARKKDWDPKKYGGFDSPTVAYSVLVVAKVEKGKSKKLKSVKELLGITIMERSSFEKNPIDFLEAKGYKEVKKDLIIKLPKYSLFELENGRKRMLASAGELQKGNELALPSKYVNFLYLASHYEKLKGSPEDNEQKQLFVEQHKHYLDEIIEQISEFSKRVILADANLDKVLSAYNKHRDKPIREQAENIIHLFTLTNLGAPAAFKYFDTTIDRKRYTSTKEVLDATLIHQSITGLYETRIDLSQLGGD

SEQ ID NO: 298 - protein, 1554 aa, synthetic construct
  REGION 1..1554: note = 122 Cas9 TadACP136ins 1041 polypeptide sequence
MDKKYSIGLAIGTNSVGWAVITDEYKVPSKKFKVLGNTDRHSIKKNLIGALLFDSGETAEATRLKRTARRRYTRRKNRICYLQEIFSNEMAKVDDSFFHRLEESFLVEEDKKHERHPIFGNIVDEVAYHEKYPTIYHLRKKLVDSTDKADLRLIYLALAHMIKFRGHFLIEGDLNPDNSDVDKLFIQLVQTYNQLFEENPINASGVDAKAILSARLSKSRRLENLIAQLPGEKKNGLFGNLIALSLGLTPNFKSNFDLAEDAKLQLSKDTYDDDLDNLLAQIGDQYADLFLAAKNLSDAILLSDILRVNTEITKAPLSASMIKRYDEHHQDLTLLKALVRQQLPEKYKEIFFDQSKNGYAGYIDGGASQEEFYKFIKPILEKMDGTEELLVKLNREDLLRKQRTFDNGSIPHQIHLGELHAILRRQEDFYPFLKDNREKIEKILTFRIPYYVGPLARGNSRFAWMTRKSEETITPWNFEEVVDKGASAQSFIERMTNFDKNLPNEKVLPKHSLLYEYFTVYNELTKVKYVTEGMRKPAFLSGEQKKAIVDLLFKTNRKVTVKQLKEDYFKKIECFDSVEISGVEDRFNASLGTYHDLLKIIKDKDFLDNEENEDILEDIVLTLTLFEDREMIEERLKTYAHLFDDKVMKQLKRRRYTGWGRLSRKLINGIRDKQSGKTILDFLKSDGFANRNFMQLIHDDSLTFKEDIQKAQVSGQGDSLHEHIANLAGSPAIKKGILQTVKVVDELVKVMGRHKPENIVIEMARENQTTQKGQKNSRERMKRIEEGIKELGSQILKEHPVENTQLQNEKLYLYYLQNGRDMYVDQELDINRLSDYDVDHIVPQSFLKDDSIDNKVLTRSDKNRGKSDNVPSEEVVKKMKNYWRQLLNAKLITQRKFDNLTKAERGGLSELDKAGFIKRQLVETRQITKHVAQILDSRMNTKYDENDKLIREVKVITLKSKLVSDFRKDFQFYKVREINNYHHAHDAYLNAVVGTALIKKYPKLESEFVYGDYKVYDVRKMIAKSEQEIGKATAKYFFYSMNHRVEITEGILADECAALLCYFFRMPRQVFNAQKKAQSSTDGSSGSETPGTSESATPESSGSEVEFSHEYWMRHALTLAKRARDEREVPVGAVLVLNNRVIGEGWNRAIGLHDPTAHAEIMALRQGGLVMQNYRLIDATLYVTFEPCVMCAGAMIHSRIGRVVFGVRNAKTGAAGSLMDVLHYPGNIMNFFKTEITLANGEIRKRPLIETNGETGEIVWDKGRDFATVRKVLSMPQVNIVKKTEVQTGGFSKESILPKRNSDKLIARKKDWDPKKYGGFDSPTVAYSVLVVAKVEKGKSKKLKSVKELLGITIMERSSFEKNPIDFLEAKGYKEVKKDLIIKLPKYSLFELENGRKRMLASAGELQKGNELALPSKYVNFLYLASHYEKLKGSPEDNEQKQLFVEQHKHYLDEIIEQISEFSKRVILADANLDKVLSAYNKHRDKPIREQAENIIHLFTLTNLGAPAAFKYFDTTIDRKRYTSTKEVLDATLIHQSITGLYETRIDLSQLGGD

SEQ ID NO: 299 - protein, 1554 aa, synthetic construct
  REGION 1..1554: note = 123 Cas9 TadACP139ins 1299 polypeptide sequence
MDKKYSIGLAIGTNSVGWAVITDEYKVPSKKFKVLGNTDRHSIKKNLIGALLFDSGETAEATRLKRTARRRYTRRKNRICYLQEIFSNEMAKVDDSFFHRLEESFLVEEDKKHERHPIFGNIVDEVAYHEKYPTIYHLRKKLVDSTDKADLRLIYLALAHMIKFRGHFLIEGDLNPDNSDVDKLFIQLVQTYNQLFEENPINASGVDAKAILSARLSKSRRLENLIAQLPGEKKNGLFGNLIALSLGLTPNFKSNFDLAEDAKLQLSKDTYDDDLDNLLAQIGDQYADLFLAAKNLSDAILLSDILRVNTEITKAPLSASMIKRYDEHHQDLTLLKALVRQQLPEKYKEIFFDQSKNGYAGYIDGGASQEEFYKFIKPILEKMDGTEELLVKLNREDLLRKQRTFDNGSIPHQIHLGELHAILRRQEDFYPFLKDNREKIEKILTFRIPYYVGPLARGNSRFAWMTRKSEETITPWNFEEVVDKGASAQSFIERMTNFDKNLPNEKVLPKHSLLYEYFTVYNELTKVKYVTEGMRKPAFLSGEQKKAIVDLLFKTNRKVTVKQLKEDYFKKIECFDSVEISGVEDRFNASLGTYHDLLKIIKDKDFLDNEENEDILEDIVLTLTLFEDREMIEERLKTYAHLFDDKVMKQLKRRRYTGWGRLSRKLINGIRDKQSGKTILDFLKSDGFANRNFMQLIHDDSLTFKEDIQKAQVSGQGDSLHEHIANLAGSPAIKKGILQTVKVVDELVKVMGRHKPENIVIEMARENQTTQKGQKNSRERMKRIEEGIKELGSQILKEHPVENTQLQNEKLYLYYLQNGRDMYVDQELDINRLSDYDVDHIVPQSFLKDDSIDNKVLTRSDKNRGKSDNVPSEEVVKKMKNYWRQLLNAKLITQRKFDNLTKAERGGLSELDKAGFIKRQLVETRQITKHVAQILDSRMNTKYDENDKLIREVKVITLKSKLVSDFRKDFQFYKVREINNYHHAHDAYLNAVVGTALIKKYPKLESEFVYGDYKVYDVRKMIAKSEQEIGKATAKYFFYSNIMNFFKTEITLANGEIRKRPLIETNGETGEIVWDKGRDFATVRKVLSMPQVNIVKKTEVQTGGFSKESILPKRNSDKLIARKKDWDPKKYGGFDSPTVAYSVLVVAKVEKGKSKKLKSVKELLGITIMERSSFEKNPIDFLEAKGYKEVKKDLIIKLPKYSLFELENGRKRMLASAGELQKGNELALPSKYVNFLYLASHYEKLKGSPEDNEQKQLFVEQHKHYLDEIIEQISEFSKRVILADANLDKVLSAYNKHRMNHRVEITEGILADECAALLCYFFRMPRQVFNAQKKAQSSTDGSSGSETPGTSESATPESSGSEVEFSHEYWMRHALTLAKRARDEREVPVGAVLVLNNRVIGEGWNRAIGLHDPTAHAEIMALRQGGLVMQNYRLIDATLYVTFEPCVMCAGAMIHSRIGRVVFGVRNAKTGAAGSLMDVLHYPGDKPIREQAENIIHLFTLTNLGAPAAFKYFDTTIDRKRYTSTKEVLDATLIHQSITGLYETRIDLSQLGGD

SEQ ID NO: 300 - protein, 1454 aa, synthetic construct
  REGION 1..1454: note = 124 Cas9 delta 792-872TadAins polypeptide sequence
MDKKYSIGLAIGTNSVGWAVITDEYKVPSKKFKVLGNTDRHSIKKNLIGALLFDSGETAEATRLKRTARRRYTRRKNRICYLQEIFSNEMAKVDDSFFHRLEESFLVEEDKKHERHPIFGNIVDEVAYHEKYPTIYHLRKKLVDSTDKADLRLIYLALAHMIKFRGHFLIEGDLNPDNSDVDKLFIQLVQTYNQLFEENPINASGVDAKAILSARLSKSRRLENLIAQLPGEKKNGLFGNLIALSLGLTPNFKSNFDLAEDAKLQLSKDTYDDDLDNLLAQIGDQYADLFLAAKNLSDAILLSDILRVNTEITKAPLSASMIKRYDEHHQDLTLLKALVRQQLPEKYKEIFFDQSKNGYAGYIDGGASQEEFYKFIKPILEKMDGTEELLVKLNREDLLRKQRTFDNGSIPHQIHLGELHAILRRQEDFYPFLKDNREKIEKILTFRIPYYVGPLARGNSRFAWMTRKSEETITPWNFEEVVDKGASAQSFIERMTNFDKNLPNEKVLPKHSLLYEYFTVYNELTKVKYVTEGMRKPAFLSGEQKKAIVDLLFKTNRKVTVKQLKEDYFKKIECFDSVEISGVEDRFNASLGTYHDLLKIIKDKDFLDNEENEDILEDIVLTLTLFEDREMIEERLKTYAHLFDDKVMKQLKRRRYTGWGRLSRKLINGIRDKQSGKTILDFLKSDGFANRNFMQLIHDDSLTFKEDIQKAQVSGQGDSLHEHIANLAGSPAIKKGILQTVKVVDELVKVMGRHKPENIVIEMARENQTTQKGQKNSRERMKRIEEGIKELGSEVEFSHEYWMRHALTLAKRARDEREVPVGAVLVLNNRVIGEGWNRAIGLHDPTAHAEIMALRQGGLVMQNYRLIDATLYVTFEPCVMCAGAMIHSRIGRVVFGVRNAKTGAAGSLMDVLHYPGMNHRVEITEGILADECAALLCYFFRMPRQVFNAQKKAQSSTDEEVVKKMKNYWRQLLNAKLITQRKFDNLTKAERGGLSELDKAGFIKRQLVETRQITKHVAQILDSRMNTKYDENDKLIREVKVITLKSKLVSDFRKDFQFYKVREINNYHHAHDAYLNAVVGTALIKKYPKLESEFVYGDYKVYDVRKMIAKSEQEIGKATAKYFFYSNIMNFFKTEITLANGEIRKRPLIETNGETGEIVWDKGRDFATVRKVLSMPQVNIVKKTEVQTGGFSKESILPKRNSDKLIARKKDWDPKKYGGFDSPTVAYSVLVVAKVEKGKSKKLKSVKELLGITIMERSSFEKNPIDFLEAKGYKEVKKDLIIKLPKYSLFELENGRKRMLASAGELQKGNELALPSKYVNFLYLASHYEKLKGSPEDNEQKQLFVEQHKHYLDEIIEQISEFSKRVILADANLDKVLSAYNKHRDKPIREQAENIIHLFTLTNLGAPAAFKYFDTTIDRKRYTSTKEVLDATLIHQSITGLYETRIDLSQLGGD

SEQ ID NO: 301 - protein, 1420 aa, synthetic construct
  REGION 1..1420: note = 125 Cas9 delta 792-906TadAins polypeptide sequence
MDKKYSIGLAIGTNSVGWAVITDEYKVPSKKFKVLGNTDRHSIKKNLIGALLFDSGETAEATRLKRTARRRYTRRKNRICYLQEIFSNEMAKVDDSFFHRLEESFLVEEDKKHERHPIFGNIVDEVAYHEKYPTIYHLRKKLVDSTDKADLRLIYLALAHMIKFRGHFLIEGDLNPDNSDVDKLFIQLVQTYNQLFEENPINASGVDAKAILSARLSKSRRLENLIAQLPGEKKNGLFGNLIALSLGLTPNFKSNFDLAEDAKLQLSKDTYDDDLDNLLAQIGDQYADLFLAAKNLSDAILLSDILRVNTEITKAPLSASMIKRYDEHHQDLTLLKALVRQQLPEKYKEIFFDQSKNGYAGYIDGGASQEEFYKFIKPILEKMDGTEELLVKLNREDLLRKQRTFDNGSIPHQIHLGELHAILRRQEDFYPFLKDNREKIEKILTFRIPYYVGPLARGNSRFAWMTRKSEETITPWNFEEVVDKGASAQSFIERMTNFDKNLPNEKVLPKHSLLYEYFTVYNELTKVKYVTEGMRKPAFLSGEQKKAIVDLLFKTNRKVTVKQLKEDYFKKIECFDSVEISGVEDRFNASLGTYHDLLKIIKDKDFLDNEENEDILEDIVLTLTLFEDREMIEERLKTYAHLFDDKVMKQLKRRRYTGWGRLSRKLINGIRDKQSGKTILDFLKSDGFANRNFMQLIHDDSLTFKEDIQKAQVSGQGDSLHEHIANLAGSPAIKKGILQTVKVVDELVKVMGRHKPENIVIEMARENQTTQKGQKNSRERMKRIEEGIKELGSEVEFSHEYWMRHALTLAKRARDEREVPVGAVLVLNNRVIGEGWNRAIGLHDPTAHAEIMALRQGGLVMQNYRLIDATLYVTFEPCVMCAGAMIHSRIGRVVFGVRNAKTGAAGSLMDVLHYPGMNHRVEITEGILADECAALLCYFFRMPRQVFNAQKKAQSSTDGLSELDKAGFIKRQLVETRQITKHVAQILDSRMNTKYDENDKLIREVKVITLKSKLVSDFRKDFQFYKVREINNYHHAHDAYLNAVVGTALIKKYPKLESEFVYGDYKVYDVRKMIAKSEQEIGKATAKYFFYSNIMNFFKTEITLANGEIRKRPLIETNGETGEIVWDKGRDFATVRKVLSMPQVNIVKKTEVQTGGFSKESILPKRNSDKLIARKKDWDPKKYGGFDSPTVAYSVLVVAKVEKGKSKKLKSVKELLGITIMERSSFEKNPIDFLEAKGYKEVKKDLIIKLPKYSLFELENGRKRMLASAGELQKGNELALPSKYVNFLYLASHYEKLKGSPEDNEQKQLFVEQHKHYLDEIIEQISEFSKRVILADANLDKVLSAYNKHRDKPIREQAENIIHLFTLTNLGAPAAFKYFDTTIDRKRYTSTKEVLDATLIHQSITGLYETRIDLSQLGGD

SEQ ID NO: 302 - protein, 1554 aa, synthetic construct
  REGION 1..1554: note = 126 TadA CP65ins 1003 polypeptide sequence
MDKKYSIGLAIGTNSVGWAVITDEYKVPSKKFKVLGNTDRHSIKKNLIGALLFDSGETAEATRLKRTARRRYTRRKNRICYLQEIFSNEMAKVDDSFFHRLEESFLVEEDKKHERHPIFGNIVDEVAYHEKYPTIYHLRKKLVDSTDKADLRLIYLALAHMIKFRGHFLIEGDLNPDNSDVDKLFIQLVQTYNQLFEENPINASGVDAKAILSARLSKSRRLENLIAQLPGEKKNGLFGNLIALSLGLTPNFKSNFDLAEDAKLQLSKDTYDDDLDNLLAQIGDQYADLFLAAKNLSDAILLSDILRVNTEITKAPLSASMIKRYDEHHQDLTLLKALVRQQLPEKYKEIFFDQSKNGYAGYIDGGASQEEFYKFIKPILEKMDGTEELLVKLNREDLLRKQRTFDNGSIPHQIHLGELHAILRRQEDFYPFLKDNREKIEKILTFRIPYYVGPLARGNSRFAWMTRKSEETITPWNFEEVVDKGASAQSFIERMTNFDKNLPNEKVLPKHSLLYEYFTVYNELTKVKYVTEGMRKPAFLSGEQKKAIVDLLFKTNRKVTVKQLKEDYFKKIECFDSVEISGVEDRFNASLGTYHDLLKIIKDKDFLDNEENEDILEDIVLTLTLFEDREMIEERLKTYAHLFDDKVMKQLKRRRYTGWGRLSRKLINGIRDKQSGKTILDFLKSDGFANRNFMQLIHDDSLTFKEDIQKAQVSGQGDSLHEHIANLAGSPAIKKGILQTVKVVDELVKVMGRHKPENIVIEMARENQTTQKGQKNSRERMKRIEEGIKELGSQILKEHPVENTQLQNEKLYLYYLQNGRDMYVDQELDINRLSDYDVDHIVPQSFLKDDSIDNKVLTRSDKNRGKSDNVPSEEVVKKMKNYWRQLLNAKLITQRKFDNLTKAERGGLSELDKAGFIKRQLVETRQITKHVAQILDSRMNTKYDENDKLIREVKVITLKSKLVSDFRKDFQFYKVREINNYHHAHDAYLNAVVGTALIKKYPKTAHAEIMALRQGGLVMQNYRLIDATLYVTFEPCVMCAGAMIHSRIGRVVFGVRNAKTGAAGSLMDVLHYPGMNHRVEITEGILADECAALLCYFFRMPRQVFNAQKKAQSSTDGSSGSETPGTSESATPESSGSEVEFSHEYWMRHALTLAKRARDEREVPVGAVLVLNNRVIGEGWNRAIGLHDPLESEFVYGDYKVYDVRKMIAKSEQEIGKATAKYFFYSNIMNFFKTEITLANGEIRKRPLIETNGETGEIVWDKGRDFATVRKVLSMPQVNIVKKTEVQTGGFSKESILPKRNSDKLIARKKDWDPKKYGGFDSPTVAYSVLVVAKVEKGKSKKLKSVKELLGITIMERSSFEKNPIDFLEAKGYKEVKKDLIIKLPKYSLFELENGRKRMLASAGELQKGNELALPSKYVNFLYLASHYEKLKGSPEDNEQKQLFVEQHKHYLDEIIEQISEFSKRVILADANLDKVLSAYNKHRDKPIREQAENIIHLFTLTNLGAPAAFKYFDTTIDRKRYTSTKEVLDATLIHQSITGLYETRIDLSQLGGD

SEQ ID NO: 303 - protein, 1554 aa, synthetic construct
  REGION 1..1554: note = 127 TadA CP65ins 1016 polypeptide sequence
MDKKYSIGLAIGTNSVGWAVITDEYKVPSKKFKVLGNTDRHSIKKNLIGALLFDSGETAEATRLKRTARRRYTRRKNRICYLQEIFSNEMAKVDDSFFHRLEESFLVEEDKKHERHPIFGNIVDEVAYHEKYPTIYHLRKKLVDSTDKADLRLIYLALAHMIKFRGHFLIEGDLNPDNSDVDKLFIQLVQTYNQLFEENPINASGVDAKAILSARLSKSRRLENLIAQLPGEKKNGLFGNLIALSLGLTPNFKSNFDLAEDAKLQLSKDTYDDDLDNLLAQIGDQYADLFLAAKNLSDAILLSDILRVNTEITKAPLSASMIKRYDEHHQDLTLLKALVRQQLPEKYKEIFFDQSKNGYAGYIDGGASQEEFYKFIKPILEKMDGTEELLVKLNREDLLRKQRTFDNGSIPHQIHLGELHAILRRQEDFYPFLKDNREKIEKILTFRIPYYVGPLARGNSRFAWMTRKSEETITPWNFEEVVDKGASAQSFIERMTNFDKNLPNEKVLPKHSLLYEYFTVYNELTKVKYVTEGMRKPAFLSGEQKKAIVDLLFKTNRKVTVKQLKEDYFKKIECFDSVEISGVEDRFNASLGTYHDLLKIIKDKDFLDNEENEDILEDIVLTLTLFEDREMIEERLKTYAHLFDDKVMKQLKRRRYTGWGRLSRKLINGIRDKQSGKTILDFLKSDGFANRNFMQLIHDDSLTFKEDIQKAQVSGQGDSLHEHIANLAGSPAIKKGILQTVKVVDELVKVMGRHKPENIVIEMARENQTTQKGQKNSRERMKRIEEGIKELGSQILKEHPVENTQLQNEKLYLYYLQNGRDMYVDQELDINRLSDYDVDHIVPQSFLKDDSIDNKVLTRSDKNRGKSDNVPSEEVVKKMKNYWRQLLNAKLITQRKFDNLTKAERGGLSELDKAGFIKRQLVETRQITKHVAQILDSRMNTKYDENDKLIREVKVITLKSKLVSDFRKDFQFYKVREINNYHHAHDAYLNAVVGTALIKKYPKLESEFVYGDYKVTAHAEIMALRQGGLVMQNYRLIDATLYVTFEPCVMCAGAMIHSRIGRVVFGVRNAKTGAAGSLMDVLHYPGMNHRVEITEGILADECAALLCYFFRMPRQVFNAQKKAQSSTDGSSGSETPGTSESATPESSGSEVEFSHEYWMRHALTLAKRARDEREVPVGAVLVLNNRVIGEGWNRAIGLHDPYDVRKMIAKSEQEIGKATAKYFFYSNIMNFFKTEITLANGEIRKRPLIETNGETGEIVWDKGRDFATVRKVLSMPQVNIVKKTEVQTGGFSKESILPKRNSDKLIARKKDWDPKKYGGFDSPTVAYSVLVVAKVEKGKSKKLKSVKELLGITIMERSSFEKNPIDFLEAKGYKEVKKDLIIKLPKYSLFELENGRKRMLASAGELQKGNELALPSKYVNFLYLASHYEKLKGSPEDNEQKQLFVEQHKHYLDEIIEQISEFSKRVILADANLDKVLSAYNKHRDKPIREQAENIIHLFTLTNLGAPAAFKYFDTTIDRKRYTSTKEVLDATLIHQSITGLYETRIDLSQLGGD

SEQ ID NO: 304 - protein, 1554 aa, synthetic construct
  REGION 1..1554: note = 128 TadA CP65ins 1022 polypeptide sequence
MDKKYSIGLAIGTNSVGWAVITDEYKVPSKKFKVLGNTDRHSIKKNLIGALLFDSGETAEATRLKRTARRRYTRRKNRICYLQEIFSNEMAKVDDSFFHRLEESFLVEEDKKHERHPIFGNIVDEVAYHEKYPTIYHLRKKLVDSTDKADLRLIYLALAHMIKFRGHFLIEGDLNPDNSDVDKLFIQLVQTYNQLFEENPINASGVDAKAILSARLSKSRRLENLIAQLPGEKKNGLFGNLIALSLGLTPNFKSNFDLAEDAKLQLSKDTYDDDLDNLLAQIGDQYADLFLAAKNLSDAILLSDILRVNTEITKAPLSASMIKRYDEHHQDLTLLKALVRQQLPEKYKEIFFDQSKNGYAGYIDGGASQEEFYKFIKPILEKMDGTEELLVKLNREDLLRKQRTFDNGSIPHQIHLGELHAILRRQEDFYPFLKDNREKIEKILTFRIPYYVGPLARGNSRFAWMTRKSEETITPWNFEEVVDKGASAQSFIERMTNFDKNLPNEKVLPKHSLLYEYFTVYNELTKVKYVTEGMRKPAFLSGEQKKAIVDLLFKTNRKVTVKQLKEDYFKKIECFDSVEISGVEDRFNASLGTYHDLLKIIKDKDFLDNEENEDILEDIVLTLTLFEDREMIEERLKTYAHLFDDKVMKQLKRRRYTGWGRLSRKLINGIRDKQSGKTILDFLKSDGFANRNFMQLIHDDSLTFKEDIQKAQVSGQGDSLHEHIANLAGSPAIKKGILQTVKVVDELVKVMGRHKPENIVIEMARENQTTQKGQKNSRERMKRIEEGIKELGSQILKEHPVENTQLQNEKLYLYYLQNGRDMYVDQELDINRLSDYDVDHIVPQSFLKDDSIDNKVLTRSDKNRGKSDNVPSEEVVKKMKNYWRQLLNAKLITQRKFDNLTKAERGGLSELDKAGFIKRQLVETRQITKHVAQILDSRMNTKYDENDKLIREVKVITLKSKLVSDFRKDFQFYKVREINNYHHAHDAYLNAVVGTALIKKYPKLESEFVYGDYKVYDVRKMITAHAEIMALRQGGLVMQNYRLIDATLYVTFEPCVMCAGAMIHSRIGRVVFGVRNAKTGAAGSLMDVLHYPGMNHRVEITEGILADECAALLCYFFRMPRQVFNAQKKAQSSTDGSSGSETPGTSESATPESSGSEVEFSHEYWMRHALTLAKRARDEREVPVGAVLVLNNRVIGEGWNRAIGLHDPAKSEQEIGKATAKYFFYSNIMNFFKTEITLANGEIRKRPLIETNGETGEIVWDKGRDFATVRKVLSMPQVNIVKKTEVQTGGFSKESILPKRNSDKLIARKKDWDPKKYGGFDSPTVAYSVLVVAKVEKGKSKKLKSVKELLGITIMERSSFEKNPIDFLEAKGYKEVKKDLIIKLPKYSLFELENGRKRMLASAGELQKGNELALPSKYVNFLYLASHYEKLKGSPEDNEQKQLFVEQHKHYLDEIIEQISEFSKRVILADANLDKVLSAYNKHRDKPIREQAENIIHLFTLTNLGAPAAFKYFDTTIDRKRYTSTKEVLDATLIHQSITGLYETRIDLSQLGGD

SEQ ID NO: 305 - protein, 1554 aa, synthetic construct
  REGION 1..1554: note = 129 TadA CP65ins 1029 polypeptide sequence
MDKKYSIGLAIGTNSVGWAVITDEYKVPSKKFKVLGNTDRHSIKKNLIGALLFDSGETAEATRLKRTARRRYTRRKNRICYLQEIFSNEMAKVDDSFFHRLEESFLVEEDKKHERHPIFGNIVDEVAYHEKYPTIYHLRKKLVDSTDKADLRLIYLALAHMIKFRGHFLIEGDLNPDNSDVDKLFIQLVQTYNQLFEENPINASGVDAKAILSARLSKSRRLENLIAQLPGEKKNGLFGNLIALSLGLTPNFKSNFDLAEDAKLQLSKDTYDDDLDNLLAQIGDQYADLFLAAKNLSDAILLSDILRVNTEITKAPLSASMIKRYDEHHQDLTLLKALVRQQLPEKYKEIFFDQSKNGYAGYIDGGASQEEFYKFIKPILEKMDGTEELLVKLNREDLLRKQRTFDNGSIPHQIHLGELHAILRRQEDFYPFLKDNREKIEKILTFRIPYYVGPLARGNSRFAWMTRKSEETITPWNFEEVVDKGASAQSFIERMTNFDKNLPNEKVLPKHSLLYEYFTVYNELTKVKYVTEGMRKPAFLSGEQKKAIVDLLFKTNRKVTVKQLKEDYFKKIECFDSVEISGVEDRFNASLGTYHDLLKIIKDKDFLDNEENEDILEDIVLTLTLFEDREMIEERLKTYAHLFDDKVMKQLKRRRYTGWGRLSRKLINGIRDKQSGKTILDFLKSDGFANRNFMQLIHDDSLTFKEDIQKAQVSGQGDSLHEHIANLAGSPAIKKGILQTVKVVDELVKVMGRHKPENIVIEMARENQTTQKGQKNSRERMKRIEEGIKELGSQILKEHPVENTQLQNEKLYLYYLQNGRDMYVDQELDINRLSDYDVDHIVPQSFLKDDSIDNKVLTRSDKNRGKSDNVPSEEVVKKMKNYWRQLLNAKLITQRKFDNLTKAERGGLSELDKAGFIKRQLVETRQITKHVAQILDSRMNTKYDENDKLIREVKVITLKSKLVSDFRKDFQFYKVREINNYHHAHDAYLNAVVGTALIKKYPKLESEFVYGDYKVYDVRKMIAKSEQEITAHAEIMALRQGGLVMQNYRLIDATLYVTFEPCVMCAGAMIHSRIGRVVFGVRNAKTGAAGSLMDVLHYPGMNHRVEITEGILADECAALLCYFFRMPRQVFNAQKKAQSSTDGSSGSETPGTSESATPESSGSEVEFSHEYWMRHALTLAKRARDEREVPVGAVLVLNNRVIGEGWNRAIGLHDPGKATAKYFFYSNIMNFFKTEITLANGEIRKRPLIETNGETGEIVWDKGRDFATVRKVLSMPQVNIVKKTEVQTGGFSKESILPKRNSDKLIARKKDWDPKKYGGFDSPTVAYSVLVVAKVEKGKSKKLKSVKELLGITIMERSSFEKNPIDFLEAKGYKEVKKDLIIKLPKYSLFELENGRKRMLASAGELQKGNELALPSKYVNFLYLASHYEKLKGSPEDNEQKQLFVEQHKHYLDEIIEQISEFSKRVILADANLDKVLSAYNKHRDKPIREQAENIIHLFTLTNLGAPAAFKYFDTTIDRKRYTSTKEVLDATLIHQSITGLYETRIDLSQLGGD

SEQ ID NO: 306 - protein, 1554 aa, synthetic construct
  REGION 1..1554: note = 130 TadA CP65ins 1041 polypeptide sequence
MDKKYSIGLAIGTNSVGWAVITDEYKVPSKKFKVLGNTDRHSIKKNLIGALLFDSGETAEATRLKRTARRRYTRRKNRICYLQEIFSNEMAKVDDSFFHRLEESFLVEEDKKHERHPIFGNIVDEVAYHEKYPTIYHLRKKLVDSTDKADLRLIYLALAHMIKFRGHFLIEGDLNPDNSDVDKLFIQLVQTYNQLFEENPINASGVDAKAILSARLSKSRRLENLIAQLPGEKKNGLFGNLIALSLGLTPNFKSNFDLAEDAKLQLSKDTYDDDLDNLLAQIGDQYADLFLAAKNLSDAILLSDILRVNTEITKAPLSASMIKRYDEHHQDLTLLKALVRQQLPEKYKEIFFDQSKNGYAGYIDGGASQEEFYKFIKPILEKMDGTEELLVKLNREDLLRKQRTFDNGSIPHQIHLGELHAILRRQEDFYPFLKDNREKIEKILTFRIPYYVGPLARGNSRFAWMTRKSEETITPWNFEEVVDKGASAQSFIERMTNFDKNLPNEKVLPKHSLLYEYFTVYNELTKVKYVTEGMRKPAFLSGEQKKAIVDLLFKTNRKVTVKQLKEDYFKKIECFDSVEISGVEDRFNASLGTYHDLLKIIKDKDFLDNEENEDILEDIVLTLTLFEDREMIEERLKTYAHLFDDKVMKQLKRRRYTGWGRLSRKLINGIRDKQSGKTILDFLKSDGFANRNFMQLIHDDSLTFKEDIQKAQVSGQGDSLHEHIANLAGSPAIKKGILQTVKVVDELVKVMGRHKPENIVIEMARENQTTQKGQKNSRERMKRIEEGIKELGSQILKEHPVENTQLQNEKLYLYYLQNGRDMYVDQELDINRLSDYDVDHIVPQSFLKDDSIDNKVLTRSDKNRGKSDNVPSEEVVKKMKNYWRQLLNAKLITQRKFDNLTKAERGGLSELDKAGFIKRQLVETRQITKHVAQILDSRMNTKYDENDKLIREVKVITLKSKLVSDFRKDFQFYKVREINNYHHAHDAYLNAVVGTALIKKYPKLESEFVYGDYKVYDVRKMIAKSEQEIGKATAKYFFYSTAHAEIMALRQGGLVMQNYRLIDATLYVTFEPCVMCAGAMIHSRIGRVVFGVRNAKTGAAGSLMDVLHYPGMNHRVEITEGILADECAALLCYFFRMPRQVFNAQKKAQSSTDGSSGSETPGTSESATPESSGSEVEFSHEYWMRHALTLAKRARDEREVPVGAVLVLNNRVIGEGWNRAIGLHDPNIMNFFKTEITLANGEIRKRPLIETNGETGEIVWDKGRDFATVRKVLSMPQVNIVKKTEVQTGGFSKESILPKRNSDKLIARKKDWDPKKYGGFDSPTVAYSVLVVAKVEKGKSKKLKSVKELLGITIMERSSFEKNPIDFLEAKGYKEVKKDLIIKLPKYSLFELENGRKRMLASAGELQKGNELALPSKYVNFLYLASHYEKLKGSPEDNEQKQLFVEQHKHYLDEIIEQISEFSKRVILADANLDKVLSAYNKHRDKPIREQAENIIHLFTLTNLGAPAAFKYFDTTIDRKRYTSTKEVLDATLIHQSITGLYETRIDLSQLGGD

SEQ ID NO: 307 - protein, 1554 aa, synthetic construct
  REGION 1..1554: note = 131 TadA CP65ins 1054 polypeptide sequence
MDKKYSIGLAIGTNSVGWAVITDEYKVPSKKFKVLGNTDRHSIKKNLIGALLFDSGETAEATRLKRTARRRYTRRKNRICYLQEIFSNEMAKVDDSFFHRLEESFLVEEDKKHERHPIFGNIVDEVAYHEKYPTIYHLRKKLVDSTDKADLRLIYLALAHMIKFRGHFLIEGDLNPDNSDVDKLFIQLVQTYNQLFEENPINASGVDAKAILSARLSKSRRLENLIAQLPGEKKNGLFGNLIALSLGLTPNFKSNFDLAEDAKLQLSKDTYDDDLDNLLAQIGDQYADLFLAAKNLSDAILLSDILRVNTEITKAPLSASMIKRYDEHHQDLTLLKALVRQQLPEKYKEIFFDQSKNGYAGYIDGGASQEEFYKFIKPILEKMDGTEELLVKLNREDLLRKQRTFDNGSIPHQIHLGELHAILRRQEDFYPFLKDNREKIEKILTFRIPYYVGPLARGNSRFAWMTRKSEETITPWNFEEVVDKGASAQSFIERMTNFDKNLPNEKVLPKHSLLYEYFTVYNELTKVKYVTEGMRKPAFLSGEQKKAIVDLLFKTNRKVTVKQLKEDYFKKIECFDSVEISGVEDRFNASLGTYHDLLKIIKDKDFLDNEENEDILEDIVLTLTLFEDREMIEERLKTYAHLFDDKVMKQLKRRRYTGWGRLSRKLINGIRDKQSGKTILDFLKSDGFANRNFMQLIHDDSLTFKEDIQKAQVSGQGDSLHEHIANLAGSPAIKKGILQTVKVVDELVKVMGRHKPENIVIEMARENQTTQKGQKNSRERMKRIEEGIKELGSQILKEHPVENTQLQNEKLYLYYLQNGRDMYVDQELDINRLSDYDVDHIVPQSFLKDDSIDNKVLTRSDKNRGKSDNVPSEEVVKKMKNYWRQLLNAKLITQRKFDNLTKAERGGLSELDKAGFIKRQLVETRQITKHVAQILDSRMNTKYDENDKLIREVKVITLKSKLVSDFRKDFQFYKVREINNYHHAHDAYLNAVVGTALIKKYPKLESEFVYGDYKVYDVRKMIAKSEQEIGKATAKYFFYSNIMNFFKTEITLANTAHAEIMALRQGGLVMQNYRLIDATLYVTFEPCVMCAGAMIHSRIGRVVFGVRNAKTGAAGSLMDVLHYPGMNHRVEITEGILADECAALLCYFFRMPRQVFNAQKKAQSSTDGSSGSETPGTSESATPESSGSEVEFSHEYWMRHALTLAKRARDEREVPVGAVLVLNNRVIGEGWNRAIGLHDPGEIRKRPLIETNGETGEIVWDKGRDFATVRKVLSMPQVNIVKKTEVQTGGFSKESILPKRNSDKLIARKKDWDPKKYGGFDSPTVAYSVLVVAKVEKGKSKKLKSVKELLGITIMERSSFEKNPIDFLEAKGYKEVKKDLIIKLPKYSLFELENGRKRMLASAGELQKGNELALPSKYVNFLYLASHYEKLKGSPEDNEQKQLFVEQHKHYLDEIIEQISEFSKRVILADANLDKVLSAYNKHRDKPIREQAENIIHLFTLTNLGAPAAFKYFDTTIDRKRYTSTKEVLDATLIHQSITGLYETRIDLSQLGGD

SEQ ID NO: 308 - protein, 1554 aa, synthetic construct
  REGION 1..1554: note = 132 TadA CP65ins 1246 polypeptide sequence
MDKKYSIGLAIGTNSVGWAVITDEYKVPSKKFKVLGNTDRHSIKKNLIGALLFDSGETAEATRLKRTARRRYTRRKNRICYLQEIFSNEMAKVDDSFFHRLEESFLVEEDKKHERHPIFGNIVDEVAYHEKYPTIYHLRKKLVDSTDKADLRLIYLALAHMIKFRGHFLIEGDLNPDNSDVDKLFIQLVQTYNQLFEENPINASGVDAKAILSARLSKSRRLENLIAQLPGEKKNGLFGNLIALSLGLTPNFKSNFDLAEDAKLQLSKDTYDDDLDNLLAQIGDQYADLFLAAKNLSDAILLSDILRVNTEITKAPLSASMIKRYDEHHQDLTLLKALVRQQLPEKYKEIFFDQSKNGYAGYIDGGASQEEFYKFIKPILEKMDGTEELLVKLNREDLLRKQRTFDNGSIPHQIHLGELHAILRRQEDFYPFLKDNREKIEKILTFRIPYYVGPLARGNSRFAWMTRKSEETITPWNFEEVVDKGASAQSFIERMTNFDKNLPNEKVLPKHSLLYEYFTVYNELTKVKYVTEGMRKPAFLSGEQKKAIVDLLFKTNRKVTVKQLKEDYFKKIECFDSVEISGVEDRFNASLGTYHDLLKIIKDKDFLDNEENEDILEDIVLTLTLFEDREMIEERLKTYAHLFDDKVMKQLKRRRYTGWGRLSRKLINGIRDKQSGKTILDFLKSDGFANRNFMQLIHDDSLTFKEDIQKAQVSGQGDSLHEHIANLAGSPAIKKGILQTVKVVDELVKVMGRHKPENIVIEMARENQTTQKGQKNSRERMKRIEEGIKELGSQILKEHPVENTQLQNEKLYLYYLQNGRDMYVDQELDINRLSDYDVDHIVPQSFLKDDSIDNKVLTRSDKNRGKSDNVPSEEVVKKMKNYWRQLLNAKLITQRKFDNLTKAERGGLSELDKAGFIKRQLVETRQITKHVAQILDSRMNTKYDENDKLIREVKVITLKSKLVSDFRKDFQFYKVREINNYHHAHDAYLNAVVGTALIKKYPKLESEFVYGDYKVYDVRKMIAKSEQEIGKATAKYFFYSNIMNFFKTEITLANGEIRKRPLIETNGETGEIVWDKGRDFATVRKVLSMPQVNIVKKTEVQTGGFSKESILPKRNSDKLIARKKDWDPKKYGGFDSPTVAYSVLVVAKVEKGKSKKLKSVKELLGITIMERSSFEKNPIDFLEAKGYKEVKKDLIIKLPKYSLFELENGRKRMLASAGELQKGNELALPSKYVNFLYLASHYEKLKGTAHAEIMALRQGGLVMQNYRLIDATLYVTFEPCVMCAGAMIHSRIGRVVFGVRNAKTGAAGSLMDVLHYPGMNHRVEITEGILADECAALLCYFFRMPRQVFNAQKKAQSSTDGSSGSETPGTSESATPESSGSEVEFSHEYWMRHALTLAKRARDEREVPVGAVLVLNNRVIGEGWNRAIGLHDPSPEDNEQKQLFVEQHKHYLDEIIEQISEFSKRVILADANLDKVLSAYNKHRDKPIREQAENIIHLFTLTNLGAPAAFKYFDTTIDRKRYTSTKEVLDATLIHQSITGLYETRIDLSQLGGD

SEQ ID NO: 309 - protein, 160 aa, Staphylococcus aureus
  REGION 1..160: note = MISC_FEATURE - TadA polypeptide sequence
MGSHMTNDIYFMTLAIEEAKKAAQLGEVPIGAIITKDDEVIARAHNLRETLQQPTAHAEHIAIERAAKVLGSWRLEGCTLYVTLEPCVMCAGTIVMSRIPRVVYGADDPKGGCSGSLMNLLQQSNFNHRAIVDKGVLKEACSTLLTTFFKNLRANKKSTN

SEQ ID NO: 310 - protein, 161 aa, Bacillus subtilis
  REGION 1..161: note = MISC_FEATURE - TadA polypeptide sequence
MTQDELYMKEAIKEAKKAEEKGEVPIGAVLVINGEIIARAHNLRETEQRSIAHAEMLVIDEACKALGTWRLEGATLYVTLEPCPMCAGAVVLSRVEKVVFGAFDPKGGCSGTLMNLLQEERFNHQAEVVSGVLEEECGGMLSAFFRELRKKKKAARKNLSE

SEQ ID NO: 311 - protein, 183 aa, Salmonella enterica
  REGION 1..183: note = MISC_FEATURE - TadA polypeptide sequence
  source 1..183: note = serovar Typhimurium
MPPAFITGVTSLSDVELDHEYWMRHALTLAKRAWDEREVPVGAVLVHNHRVIGEGWNRPIGRHDPTAHAEIMALRQGGLVLQNYRLLDTTLYVTLEPCVMCAGAMVHSRIGRVVFGARDAKTGAAGSLIDVLHHPGMNHRVEIIEGVLRDECATLLSDFFRMRRQEIKALKKADRAEGAGPAV

SEQ ID NO: 312 - protein, 164 aa, Shewanella putrefaciens
  REGION 1..164: note = MISC_FEATURE - TadA polypeptide sequence
MDEYWMQVAMQMAEKAEAAGEVPVGAVLVKDGQQIATGYNLSISQHDPTAHAEILCLRSAGKKLENYRLLDATLYITLEPCAMCAGAMVHSRIARVVYGARDEKTGAAGTVVNLLQHPAFNHQVEVTSGVLAEACSAQLSRFFKRRRDEKKALKLAQRAQQGIE

SEQ ID NO: 313 - protein, 173 aa, Haemophilus influenzae
  REGION 1..173: note = MISC_FEATURE - TadA polypeptide sequence
MDAAKVRSEFDEKMMRYALELADKAEALGEIPVGAVLVDDARNIIGEGWNLSIVQSDPTAHAEIIALRNGAKNIQNYRLLNSTLYVTLEPCTMCAGAILHSRIKRLVFGASDYKTGAIGSRFHFFDDYKMNHTLEITSGVLAEECSQKLSTFFQKRREEKKIEKALLKSLSDK

SEQ ID NO: 314 - protein, 161 aa, Caulobacter crescentus
  REGION 1..161: note = MISC_FEATURE - TadA polypeptide sequence
MRTDESEDQDHRMMRLALDAARAAAEAGETPVGAVILDPSTGEVIATAGNGPIAAHDPTAHAEIAAMRAAAAKLGNYRLTDLTLVVTLEPCAMCAGAISHARIGRVVFGADDPKGGAVVHGPKFFAQPTCHWRPEVTGGVLADESADLLRGFFRARRKAKI

SEQ ID NO: 315 - protein, 179 aa, Geobacter sulfurreducens
  REGION 1..179: note = MISC_FEATURE - TadA polypeptide sequence
MSSLKKTPIRDDAYWMGKAIREAAKAAARDEVPIGAVIVRDGAVIGRGHNLREGSNDPSAHAEMIAIRQAARRSANWRLTGATLYVTLEPCLMCMGAIILARLERVVFGCYDPKGGAAGSLYDLSADPRLNHQVRLSPGVCQEECGTMLSDFFRDLRRRKKAKATPALFIDERKVPPEP

SEQ ID NO: 316 - protein, 167 aa, synthetic construct
  REGION 1..167: note = TadA*8 polypeptide sequence
MSEVEFSHEYWMRHALTLAKRARDEREVPVGAVLVLNNRVIGEGWNRAIGLHDPTAHAEIMALRQGGLVMQNYRLIDATLYVTFEPCVMCAGAMIHSRIGRVVFGVRNAKTGAAGSLMDVLHYPGMNHRVEITEGILADECAALLCTFFRMPRQVFNAQKKAQSSTD

SEQ ID NO: 317 - RNA, 80 nt, synthetic construct
  misc_feature 1..80: note = gRNA scaffold polynucleotide sequence
  source 1..80: mol_type = other RNA
gttttagagctagaaatagcaagttaaaataaggctagtccgttatcaacttgaaaaagtggcaccgagtcggtgctttt

SEQ ID NO: 318 - RNA, 125 nt, synthetic construct
  misc_feature 1..125: note = gRNA scaffold polynucleotide sequence
  source 1..125: mol_type = other RNA
gtttttgtactctcaagatttaagtaactgtacaacgaaacttacacagttacttaaatcttgcagaagctacaaagataaggcttcatgccgaaatcaacaccctgtcattttatggcagggtg

SEQ ID NO: 319 - RNA, 76 nt, Streptococcus pyogenes
  misc_feature 1..76: note = S. pyogenes gRNA scaffold oligonucleotide sequence
  source 1..76: mol_type = other RNA
gttttagagctagaaatagcaagttaaaataaggctagtccgttatcaacttgaaaaagtggcaccgagtcggtgc

SEQ ID NO: 320 - RNA, 84 nt, Staphylococcus aureus
  misc_feature 1..84: note = S. aureus gRNA scaffold oligonucleotide sequence
  source 1..84: mol_type = other RNA
gttttagtactctgtaatgaaaattacagaatctactaaaacaaggcaaaatgccgtgtttatctcgtcaacttgttggcgaga

SEQ ID NO: 321 - RNA, 97 nt, Bacillus hisashii
  misc_feature 1..97: note = BhCas12b gRNA scaffold oligonucleotide sequence
  source 1..97: mol_type = other RNA
gttctgtcttttggtcaggacaaccgtctagctataagtgctgcagggtgtgagaaactcctattgctggacgatgtctcttacgaggcattagcac

SEQ ID NO: 322 - RNA, 88 nt, Bacillus sp.
  misc_feature 1..88: note = BvCas12b gRNA scaffold oligonucleotide sequence
  source 1..88: mol_type = other RNA
gacctatagggtcaatgaatctgtgcgtgtgccataagtaattaaaaattacccaccacaggagcacctgaaaacaggtgcttggcac

SEQ ID NO: 323 - RNA, 80 nt, synthetic construct
  misc_feature 1..80: note = gRNA scaffold nucleotide sequence; oligonucleotide sequence
  modified_base 78..80: mod_base = um
  misc_feature 78..80: note = In embodiments, a nucleotide(s) is linked to the preceding 5' nucleotide by a 3' phosphorothioate internucleotide linkage
  source 1..80: mol_type = other RNA
gttttagagctagaaatagcaagttaaaataaggctagtccgttatcaacttgaaaaagtgggaccgagtcggtgctttt

SEQ ID NO: 324 - RNA, 80 nt, synthetic construct; identical to SEQ ID NO: 317
  misc_feature 1..80: note = gRNA scaffold nucleotide sequence
  misc_feature 78..80: note = In embodiments, a nucleotide(s) is linked to the preceding 5' nucleotide by a 3' phosphorothioate internucleotide linkage
  modified_base 78..80: mod_base = um
  source 1..80: mol_type = other RNA

SEQ ID NO: 325 - RNA, 117 nt, Bacillus hisashii
  misc_feature 1..117: note = BhCas12b gRNA scaffold + guide sequence; oligonucleotide sequence
  misc_feature 1..97: note = BhCas12b sgRNA scaffold
  source 1..117: mol_type = other RNA
gttctgtcttttggtcaggacaaccgtctagctataagtgctgcagggtgtgagaaactcctattgctggacgatgtctcttacgaggcattagcacnnnnnnnnnnnnnnnnnnnn

SEQ ID NO: 326 - RNA, 108 nt, Bacillus sp.
  misc_feature 1..108: note = BvCas12b gRNA scaffold + guide sequence; oligonucleotide sequence
  misc_feature 1..88: note = BvCas12b gRNA scaffold
  source 1..108: mol_type = other RNA
gacctatagggtcaatgaatctgtgcgtgtgccataagtaattaaaaattacccaccacaggagcacctgaaaacaggtgcttggcacnnnnnnnnnnnnnnnnnnnn

SEQ ID NO: 327 - RNA, 119 nt, Alicyclobacillus acidiphilus
  misc_feature 1..119: note = AaCas12b gRNA scaffold + guide sequence; oligonucleotide sequence
  misc_feature 1..99: note = AaCas12b gRNA scaffold
  source 1..119: mol_type = other RNA
gtctaaaggacagaatttttcaacgggtgtgccaatggccactttccaggtggcaaagcccgttgaacttctcaaaaagaacgatctgagaagtggcacnnnnnnnnnnnnnnnnnnnn

SEQ ID NO: 328 - protein, 29 aa, synthetic construct
  REGION 1..29: note = synthetic polypeptide sequence
PKKKRKVEGADKRTADGSEFESPKKKRKV

SEQ ID NO: 329 - protein, 23 aa, synthetic construct
  REGION 1..23: note = synthetic peptide sequence
RKSGKIAAIVVKRPRKPKKKRKV

SEQ ID NO: 330 - protein, 8 aa, synthetic construct
  REGION 1..8: note = synthetic peptide sequence
SGGSSGGS

SEQ ID NO: 331 - protein, 1609 aa, synthetic construct
  REGION 1..1609: note = pNMG-B335ABE8.1_Y147T_CP5_NGC PAM_monomer polypeptide sequence
MSEVEFSHEYWMRHALTLAKRARDEREVPVGAVLVLNNRVIGEGWNRAIGLHDPTAHAEIMALRQGGLVMQNYRLIDATLYVTFEPCVMCAGAMIHSRIGRVVFGVRNAKTGAAGSLMDVLHYPGMNHRVEITEGILADECAALLCTFFRMPRQVFNAQKKAQSSTDSGGSSGGSSGSETPGTSESATPESSGGSSGGSEIGKATAKYFFYSNIMNFFKTEITLANGEIRKRPLIETNGETGEIVWDKGRDFATVRKVLSMPQVNIVKKTEVQTGGFSKESILPKRNSDKLIARKKDWDPKKYGGFMQPTVAYSVLVVAKVEKGKSKKLKSVKELLGITIMERSSFEKNPIDFLEAKGYKEVKKDLIIKLPKYSLFELENGRKRMLASAKFLQKGNELALPSKYVNFLYLASHYEKLKGSPEDNEQKQLFVEQHKHYLDEIIEQISEFSKRVILADANLDKVLSAYNKHRDKPIREQAENIIHLFTLTNLGAPRAFKYFDTTIARKEYRSTKEVLDATLIHQSITGLYETRIDLSQLGGDGGSGGSGGSGGSGGSGGSGGMDKKYSIGLAIGTNSVGWAVITDEYKVPSKKFKVLGNTDRHSIKKNLIGALLFDSGETAEATRLKRTARRRYTRRKNRICYLQEIFSNEMAKVDDSFFHRLEESFLVEEDKKHERHPIFGNIVDEVAYHEKYPTIYHLRKKLVDSTDKADLRLIYLALAHMIKFRGHFLIEGDLNPDNSDVDKLFIQLVQTYNQLFEENPINASGVDAKAILSARLSKSRRLENLIAQLPGEKKNGLFGNLIALSLGLTPNFKSNFDLAEDAKLQLSKDTYDDDLDNLLAQIGDQYADLFLAAKNLSDAILLSDILRVNTEITKAPLSASMIKRYDEHHQDLTLLKALVRQQLPEKYKEIFFDQSKNGYAGYIDGGASQEEFYKFIKPILEKMDGTEELLVKLNREDLLRKQRTFDNGSIPHQIHLGELHAILRRQEDFYPFLKDNREKIEKILTFRIPYYVGPLARGNSRFAWMTRKSEETITPWNFEEVVDKGASAQSFIERMTNFDKNLPNEKVLPKHSLLYEYFTVYNELTKVKYVTEGMRKPAFLSGEQKKAIVDLLFKTNRKVTVKQLKEDYFKKIECFDSVEISGVEDRFNASLGTYHDLLKIIKDKDFLDNEENEDILEDIVLTLTLFEDREMIEERLKTYAHLFDDKVMKQLKRRRYTGWGRLSRKLINGIRDKQSGKTILDFLKSDGFANRNFMQLIHDDSLTFKEDIQKAQVSGQGDSLHEHIANLAGSPAIKKGILQTVKVVDELVKVMGRHKPENIVIEMARENQTTQKGQKNSRERMKRIEEGIKELGSQILKEHPVENTQLQNEKLYLYYLQNGRDMYVDQELDINRLSDYDVDHIVPQSFLKDDSIDNKVLTRSDKNRGKSDNVPSEEVVKKMKNYWRQLLNAKLITQRKFDNLTKAERGGLSELDKAGFIKRQLVETRQITKHVAQILDSRMNTKYDENDKLIREVKVITLKSKLVSDFRKDFQFYKVREINNYHHAHDAYLNAVVGTALIKKYPKLESEFVYGDYKVYDVRKMIAKSEQEGADKRTADGSEFESPKKKRKV

SEQ ID NO: 332 - protein, 1807 aa, synthetic construct
  REGION 1..1807: note = pNMG-357_ABE8.14 with NGC PAMCP5 polypeptide sequence
  REGION 1..174: note = MISC_FEATURE - Adenosine deaminase sequence
  REGION 175..198: note = MISC_FEATURE - Linker sequence
  REGION 199..365: note = MISC_FEATURE - Adenosine deaminase sequence
  REGION 366..397: note = MISC_FEATURE - Linker sequence
  REGION 398..738: note = MISC_FEATURE - Sequence derived from Cas9
  REGION 739..759: note = MISC_FEATURE - Linker sequence
  REGION 760..1785: note = MISC_FEATURE - Sequence derived from Cas9
  REGION 1786..1807: note = MISC_FEATURE - Bipartite nuclear localization sequence
MSEVEFSHEYWMRHALTLAKRAWDEREVPVGAVLVHNNRVIGEGWNRPIGRHDPTAHAEIMALRQGGLVMQNYRLIDATLYVTLEPCVMCAGAMIHSRIGRVVFGARDAKTGAAGSLMDVLHHPGMNHRVEITEGILADECAALLSDFFRMRRQEIKAQKKAQSSTDGGSSGGSSGSETPGTSESATPESSGGSSGGSMSEVEFSHEYWMRHALTLAKRARDEREVPVGAVLVLNNRVIGEGWNRAIGLHDPTAHAEIMALRQGGLVMQNYRLIDATLYVTFEPCVMCAGAMIHSRIGRVVFGVRNAKTGAAGSLMDVLHYPGMNHRVEITEGILADECAALLCTFFRMPRQVFNAQKKAQSSTDSGGSSGGSSGSETPGTSESATPESSGGSSGGSEIGKATAKYFFYSNIMNFFKTEITLANGEIRKRPLIETNGETGEIVWDKGRDFATVRKVLSMPQVNIVKKTEVQTGGFSKESILPKRNSDKLIARKKDWDPKKYGGFMQPTVAYSVLVVAKVEKGKSKKLKSVKELLGITIMERSSFEKNPIDFLEAKGYKEVKKDLIIKLPKYSLFELENGRKRMLASAKFLQKGNELALPSKYVNFLYLASHYEKLKGSPEDNEQKQLFVEQHKHYLDEIIEQISEFSKRVILADANLDKVLSAYNKHRDKPIREQAENIIHLFTLTNLGAPRAFKYFDTTIARKEYRSTKEVLDATLIHQSITGLYETRIDLSQLGGDGGSGGSGGSGGSGGSGGSGGMDKKYSIGLAIGTNSVGWAVITDEYKVPSKKFKVLGNTDRHSIKKNLIGALLFDSGETAEATRLKRTARRRYTRRKNRICYLQEIFSNEMAKVDDSFFHRLEESFLVEEDKKHERHPIFGNIVDEVAYHEKYPTIYHLRKKLVDSTDKADLRLIYLALAHMIKFRGHFLIEGDLNPDNSDVDKLFIQLVQTYNQLFEENPINASGVDAKAILSARLSKSRRLENLIAQLPGEKKNGLFGNLIALSLGLTPNFKSNFDLAEDAKLQLSKDTYDDDLDNLLAQIGDQYADLFLAAKNLSDAILLSDILRVNTEITKAPLSASMIKRYDEHHQDLTLLKALVRQQLPEKYKEIFFDQSKNGYAGYIDGGASQEEFYKFIKPILEKMDGTEELLVKLNREDLLRKQRTFDNGSIPHQIHLGELHAILRRQEDFYPFLKDNREKIEKILTFRIPYYVGPLARGNSRFAWMTRKSEETITPWNFEEVVDKGASAQSFIERMTNFDKNLPNEKVLPKHSLLYEYFTVYNELTKVKYVTEGMRKPAFLSGEQKKAIVDLLFKTNRKVTVKQLKEDYFKKIECFDSVEISGVEDRFNASLGTYHDLLKIIKDKDFLDNEENEDILEDIVLTLTLFEDREMIEERLKTYAHLFDDKVMKQLKRRRYTGWGRLSRKLINGIRDKQSGKTILDFLKSDGFANRNFMQLIHDDSLTFKEDIQKAQVSGQGDSLHEHIANLAGSPAIKKGILQTVKVVDELVKVMGRHKPENIVIEMARENQTTQKGQKNSRERMKRIEEGIKELGSQILKEHPVENTQLQNEKLYLYYLQNGRDMYVDQELDINRLSDYDVDHIVPQSFLKDDSIDNKVLTRSDKNRGKSDNVPSEEVVKKMKNYWRQLLNAKLITQRKFDNLTKAERGGLSELDKAGFIKRQLVETRQITKHVAQILDSRMNTKYDENDKLIREVKVITLKSKLVSDFRKDFQFYKVREINNYHHAHDAYLNAVVGTALIKKYPKLESEFVYGDYKVYDVRKMIAKSEQEGADKRTADGSEFESPKKKRKV

SEQ ID NO: 333 - protein, 1588 aa, synthetic construct
  REGION 1..1588: note = ABE8.8-m polypeptide sequence
  REGION 1..167: note = MISC_FEATURE - Adenosine deaminase sequence
  REGION 168..199: note = MISC_FEATURE - Linker sequence
  REGION 200..1566: note = MISC_FEATURE - Sequence derived from Cas9
  REGION 1567..1588: note = MISC_FEATURE - Bipartite nuclear localization sequence
MSEVEFSHEYWMRHALTLAKRARDEREVPVGAVLVLNNRVIGEGWNRAIGLHDPTAHAEIMALRQGGLVMQNYRLIDATLYVTFEPCVMCAGAMIHSRIGRVVFGVRNAKTGAAGSLMDVLHHPGMNHRVEITEGILADECAALLCRFFRMPRRVFNAQKKAQSSTDSGGSSGGSSGSETPGTSESATPESSGGSSGGSDKKYSIGLAIGTNSVGWAVITDEYKVPSKKFKVLGNTDRHSIKKNLIGALLFDSGETAEATRLKRTARRRYTRRKNRICYLQEIFSNEMAKVDDSFFHRLEESFLVEEDKKHERHPIFGNIVDEVAYHEKYPTIYHLRKKLVDSTDKADLRLIYLALAHMIKFRGHFLIEGDLNPDNSDVDKLFIQLVQTYNQLFEENPINASGVDAKAILSARLSKSRRLENLIAQLPGEKKNGLFGNLIALSLGLTPNFKSNFDLAEDAKLQLSKDTYDDDLDNLLAQIGDQYADLFLAAKNLSDAILLSDILRVNTEITKAPLSASMIKRYDEHHQDLTLLKALVRQQLPEKYKEIFFDQSKNGYAGYIDGGASQEEFYKFIKPILEKMDGTEELLVKLNREDLLRKQRTFDNGSIPHQIHLGELHAILRRQEDFYPFLKDNREKIEKILTFRIPYYVGPLARGNSRFAWMTRKSEETITPWNFEEVVDKGASAQSFIERMTNFDKNLPNEKVLPKHSLLYEYFTVYNELTKVKYVTEGMRKPAFLSGEQKKAIVDLLFKTNRKVTVKQLKEDYFKKIECFDSVEISGVEDRFNASLGTYHDLLKIIKDKDFLDNEENEDILEDIVLTLTLFEDREMIEERLKTYAHLFDDKVMKQLKRRRYTGWGRLSRKLINGIRDKQSGKTILDFLKSDGFANRNFMQLIHDDSLTFKEDIQKAQVSGQGDSLHEHIANLAGSPAIKKGILQTVKVVDELVKVMGRHKPENIVIEMARENQTTQKGQKNSRERMKRIEEGIKELGSQILKEHPVENTQLQNEKLYLYYLQNGRDMYVDQELDINRLSDYDVDHIVPQSFLKDDSIDNKVLTRSDKNRGKSDNVPSEEVVKKMKNYWRQLLNAKLITQRKFDNLTKAERGGLSELDKAGFIKRQLVETRQITKHVAQILDSRMNTKYDENDKLIREVKVITLKSKLVSDFRKDFQFYKVREINNYHHAHDAYLNAVVGTALIKKYPKLESEFVYGDYKVYDVRKMIAKSEQEIGKATAKYFFYSNIMNFFKTEITLANGEIRKRPLIETNGETGEIVWDKGRDFATVRKVLSMPQVNIVKKTEVQTGGFSKESILPKRNSDKLIARKKDWDPKKYGGFDSPTVAYSVLVVAKVEKGKSKKLKSVKELLGITIMERSSFEKNPIDFLEAKGYKEVKKDLIIKLPKYSLFELENGRKRMLASAGELQKGNELALPSKYVNFLYLASHYEKLKGSPEDNEQKQLFVEQHKHYLDEIIEQISEFSKRVILADANLDKVLSAYNKHRDKPIREQAENIIHLFTLTNLGAPAAFKYFDTTIDRKRYTSTKEVLDATLIHQSITGLYETRIDLSQLGGDEGADKRTADGSEFESPKKKRKV

SEQ ID NO: 334 - protein, 1786 aa, synthetic construct
  REGION 1..1786: note = ABE8.8-d polypeptide sequence
  REGION 1..167: note = MISC_FEATURE - Adenosine deaminase sequence
  REGION 168..199: note = MISC_FEATURE - Linker sequence
  REGION 200..365: note = MISC_FEATURE - Adenosine deaminase sequence
  REGION 366..397: note = MISC_FEATURE - Linker sequence
  REGION 398..1764: note = MISC_FEATURE - Sequence derived from Cas9
  REGION 1765..1786: note = MISC_FEATURE - Bipartite nuclear localization sequence
MSEVEFSHEYWMRHALTLAKRAWDEREVPVGAVLVHNNRVIGEGWNRPIGRHDPTAHAEIMALRQGGLVMQNYRLIDATLYVTLEPCVMCAGAMIHSRIGRVVFGARDAKTGAAGSLMDVLHHPGMNHRVEITEGILADECAALLSDFFRMRRQEIKAQKKAQSSTDSGGSSGGSSGSETPGTSESATPESSGGSSGGSSEVEFSHEYWMRHALTLAKRARDEREVPVGAVLVLNNRVIGEGWNRAIGLHDPTAHAEIMALRQGGLVMQNYRLIDATLYVTFEPCVMCAGAMIHSRIGRVVFGVRNAKTGAAGSLMDVLHHPGMNHRVEITEGILADECAALLCRFFRMPRRVFNAQKKAQSSTDSGGSSGGSSGSETPGTSESATPESSGGSSGGSDKKYSIGLAIGTNSVGWAVITDEYKVPSKKFKVLGNTDRHSIKKNLIGALLFDSGETAEATRLKRTARRRYTRRKNRICYLQEIFSNEMAKVDDSFFHRLEESFLVEEDKKHERHPIFGNIVDEVAYHEKYPTIYHLRKKLVDSTDKADLRLIYLALAHMIKFRGHFLIEGDLNPDNSDVDKLFIQLVQTYNQLFEENPINASGVDAKAILSARLSKSRRLENLIAQLPGEKKNGLFGNLIALSLGLTPNFKSNFDLAEDAKLQLSKDTYDDDLDNLLAQIGDQYADLFLAAKNLSDAILLSDILRVNTEITKAPLSASMIKRYDEHHQDLTLLKALVRQQLPEKYKEIFFDQSKNGYAGYIDGGASQEEFYKFIKPILEKMDGTEELLVKLNREDLLRKQRTFDNGSIPHQIHLGELHAILRRQEDFYPFLKDNREKIEKILTFRIPYYVGPLARGNSRFAWMTRKSEETITPWNFEEVVDKGASAQSFIERMTNFDKNLPNEKVLPKHSLLYEYFTVYNELTKVKYVTEGMRKPAFLSGEQKKAIVDLLFKTNRKVTVKQLKEDYFKKIECFDSVEISGVEDRFNASLGTYHDLLKIIKDKDFLDNEENEDILEDIVLTLTLFEDREMIEERLKTYAHLFDDKVMKQLKRRRYTGWGRLSRKLINGIRDKQSGKTILDFLKSDGFANRNFMQLIHDDSLTFKEDIQKAQVSGQGDSLHEHIANLAGSPAIKKGILQTVKVVDELVKVMGRHKPENIVIEMARENQTTQKGQKNSRERMKRIEEGIKELGSQILKEHPVENTQLQNEKLYLYYLQNGRDMYVDQELDINRLSDYDVDHIVPQSFLKDDSIDNKVLTRSDKNRGKSDNVPSEEVVKKMKNYWRQLLNAKLITQRKFDNLTKAERGGLSELDKAGFIKRQLVETRQITKHVAQILDSRMNTKYDENDKLIREVKVITLKSKLVSDFRKDFQFYKVREINNYHHAHDAYLNAVVGTALIKKYPKLESEFVYGDYKVYDVRKMIAKSEQEIGKATAKYFFYSNIMNFFKTEITLANGEIRKRPLIETNGETGEIVWDKGRDFATVRKVLSMPQVNIVKKTEVQTGGFSKESILPKRNSDKLIARKKDWDPKKYGGFDSPTVAYSVLVVAKVEKGKSKKLKSVKELLGITIMERSSFEKNPIDFLEAKGYKEVKKDLIIKLPKYSLFELENGRKRMLASAGELQKGNELALPSKYVNFLYLASHYEKLKGSPEDNEQKQLFVEQHKHYLDEIIEQISEFSKRVILADANLDKVLSAYNKHRDKPIREQAENIIHLFTLTNLGAPAAFKYFDTTIDRKRYTSTKEVLDATLIHQSITGLYETRIDLSQLGGDEGADKRTADGSEFESPKKKRKV

SEQ ID NO: 335 - protein, 1588 aa, synthetic construct
  REGION 1..1588: note = ABE8.13-m polypeptide sequence
  REGION 1..167: note = MISC_FEATURE - Adenosine deaminase sequence
  REGION 168..199: note = MISC_FEATURE - Linker sequence
  REGION 200..1566: note = MISC_FEATURE - Sequence derived from Cas9
  REGION 1567..1588: note = MISC_FEATURE - Bipartite nuclear localization sequence
MSEVEFSHEYWMRHALTLAKRARDEREVPVGAVLVLNNRVIGEGWNRAIGLHDPTAHAEIMALRQGGLVMQNYRLYDATLYVTFEPCVMCAGAMIHSRIGRVVFGVRNAKTGAAGSLMDVLHHPGMNHRVEITEGILADECAALLCRFFRMPRRVFNAQKKAQSSTDSGGSSGGSSGSETPGTSESATPESSGGSSGGSDKKYSIGLAIGTNSVGWAVITDEYKVPSKKFKVLGNTDRHSIKKNLIGALLFDSGETAEATRLKRTARRRYTRRKNRICYLQEIFSNEMAKVDDSFFHRLEESFLVEEDKKHERHPIFGNIVDEVAYHEKYPTIYHLRKKLVDSTDKADLRLIYLALAHMIKFRGHFLIEGDLNPDNSDVDKLFIQLVQTYNQLFEENPINASGVDAKAILSARLSKSRRLENLIAQLPGEKKNGLFGNLIALSLGLTPNFKSNFDLAEDAKLQLSKDTYDDDLDNLLAQIGDQYADLFLAAKNLSDAILLSDILRVNTEITKAPLSASMIKRYDEHHQDLTLLKALVRQQLPEKYKEIFFDQSKNGYAGYIDGGASQEEFYKFIKPILEKMDGTEELLVKLNREDLLRKQRTFDNGSIPHQIHLGELHAILRRQEDFYPFLKDNREKIEKILTFRIPYYVGPLARGNSRFAWMTRKSEETITPWNFEEVVDKGASAQSFIERMTNFDKNLPNEKVLPKHSLLYEYFTVYNELTKVKYVTEGMRKPAFLSGEQKKAIVDLLFKTNRKVTVKQLKEDYFKKIECFDSVEISGVEDRFNASLGTYHDLLKIIKDKDFLDNEENEDILEDIVLTLTLFEDREMIEERLKTYAHLFDDKVMKQLKRRRYTGWGRLSRKLINGIRDKQSGKTILDFLKSDGFANRNFMQLIHDDSLTFKEDIQKAQVSGQGDSLHEHIANLAGSPAIKKGILQTVKVVDELVKVMGRHKPENIVIEMARENQTTQKGQKNSRERMKRIEEGIKELGSQILKEHPVENTQLQNEKLYLYYLQNGRDMYVDQELDINRLSDYDVDHIVPQSFLKDDSIDNKVLTRSDKNRGKSDNVPSEEVVKKMKNYWRQLLNAKLITQRKFDNLTKAERGGLSELDKAGFIKRQLVETRQITKHVAQILDSRMNTKYDENDKLIREVKVITLKSKLVSDFRKDFQFYKVREINNYHHAHDAYLNAVVGTALIKKYPKLESEFVYGDYKVYDVRKMIAKSEQEIGKATAKYFFYSNIMNFFKTEITLANGEIRKRPLIETNGETGEIVWDKGRDFATVRKVLSMPQVNIVKKTEVQTGGFSKESILPKRNSDKLIARKKDWDPKKYGGFDSPTVAYSVLVVAKVEKGKSKKLKSVKELLGITIMERSSFEKNPIDFLEAKGYKEVKKDLIIKLPKYSLFELENGRKRMLASAGELQKGNELALPSKYVNFLYLASHYEKLKGSPEDNEQKQLFVEQHKHYLDEIIEQISEFSKRVILADANLDKVLSAYNKHRDKPIREQAENIIHLFTLTNLGAPAAFKYFDTTIDRKRYTSTKEVLDATLIHQSITGLYETRIDLSQLGGDEGADKRTADGSEFESPKKKRKV

SEQ ID NO: 336 - protein, 1786 aa, synthetic construct
  REGION 1..1786: note = ABE8.13-d polypeptide sequence
  REGION 1..167: note = MISC_FEATURE - Adenosine deaminase sequence
  REGION 168..199: note = MISC_FEATURE - Linker sequence
  REGION 200..365: note = MISC_FEATURE - Adenosine deaminase sequence
  REGION 366..397: note = MISC_FEATURE - Linker sequence
  REGION 398..1764: note = MISC_FEATURE - Sequence derived from Cas9
  REGION 1765..1786: note = MISC_FEATURE - Bipartite nuclear localization sequence
MSEVEFSHEYWMRHALTLAKRAWDEREVPVGAVLVHNNRVIGEGWNRPIGRHDPTAHAEIMALRQGGLVMQNYRLIDATLYVTLEPCVMCAGAMIHSRIGRVVFGARDAKTGAAGSLMDVLHHPGMNHRVEITEGILADECAALLSDFFRMRRQEIKAQKKAQSSTDSGGSSGGSSGSETPGTSESATPESSGGSSGGSSEVEFSHEYWMRHALTLAKRARDEREVPVGAVLVLNNRVIGEGWNRAIGLHDPTAHAEIMALRQGGLVMQNYRLYDATLYVTFEPCVMCAGAMIHSRIGRVVFGVRNAKTGAAGSLMDVLHHPGMNHRVEITEGILADECAALLCRFFRMPRRVFNAQKKAQSSTDSGGSSGGSSGSETPGTSESATPESSGGSSGGSDKKYSIGLAIGTNSVGWAVITDEYKVPSKKFKVLGNTDRHSIKKNLIGALLFDSGETAEATRLKRTARRRYTRRKNRICYLQEIFSNEMAKVDDSFFHRLEESFLVEEDKKHERHPIFGNIVDEVAYHEKYPTIYHLRKKLVDSTDKADLRLIYLALAHMIKFRGHFLIEGDLNPDNSDVDKLFIQLVQTYNQLFEENPINASGVDAKAILSARLSKSRRLENLIAQLPGEKKNGLFGNLIALSLGLTPNFKSNFDLAEDAKLQLSKDTYDDDLDNLLAQIGDQYADLFLAAKNLSDAILLSDILRVNTEITKAPLSASMIKRYDEHHQDLTLLKALVRQQLPEKYKEIFFDQSKNGYAGYIDGGASQEEFYKFIKPILEKMDGTEELLVKLNREDLLRKQRTFDNGSIPHQIHLGELHAILRRQEDFYPFLKDNREKIEKILTFRIPYYVGPLARGNSRFAWMTRKSEETITPWNFEEVVDKGASAQSFIERMTNFDKNLPNEKVLPKHSLLYEYFTVYNELTKVKYVTEGMRKPAFLSGEQKKAIVDLLFKTNRKVTVKQLKEDYFKKIECFDSVEISGVEDRFNASLGTYHDLLKIIKDKDFLDNEENEDILEDIVLTLTLFEDREMIEERLKTYAHLFDDKVMKQLKRRRYTGWGRLSRKLINGIRDKQSGKTILDFLKSDGFANRNFMQLIHDDSLTFKEDIQKAQVSGQGDSLHEHIANLAGSPAIKKGILQTVKVVDELVKVMGRHKPENIVIEMARENQTTQKGQKNSRERMKRIEEGIKELGSQILKEHPVENTQLQNEKLYLYYLQNGRDMYVDQELDINRLSDYDVDHIVPQSFLKDDSIDNKVLTRSDKNRGKSDNVPSEEVVKKMKNYWRQLLNAKLITQRKFDNLTKAERGGLSELDKAGFIKRQLVETRQITKHVAQILDSRMNTKYDENDKLIREVKVITLKSKLVSDFRKDFQFYKVREINNYHHAHDAYLNAVVGTALIKKYPKLESEFVYGDYKVYDVRKMIAKSEQEIGKATAKYFFYSNIMNFFKTEITLANGEIRKRPLIETNGETGEIVWDKGRDFATVRKVLSMPQVNIVKKTEVQTGGFSKESILPKRNSDKLIARKKDWDPKKYGGFDSPTVAYSVLVVAKVEKGKSKKLKSVKELLGITIMERSSFEKNPIDFLEAKGYKEVKKDLIIKLPKYSLFELENGRKRMLASAGELQKGNELALPSKYVNFLYLASHYEKLKGSPEDNEQKQLFVEQHKHYLDEIIEQISEFSKRVILADANLDKVLSAYNKHRDKPIREQAENIIHLFTLTNLGAPAAFKYFDTTIDRKRYTSTKEVLDATLIHQSITGLYETRIDLSQLGGDEGADKRTADGSEFESPKKKRKV

SEQ ID NO: 337 - protein, 1588 aa, synthetic construct
  REGION 1..1588: note = ABE8.17-m polypeptide sequence
  REGION 1..167: note = MISC_FEATURE - Adenosine deaminase sequence
  REGION 168..199: note = MISC_FEATURE - Linker sequence
  REGION 200..1566: note = MISC_FEATURE - Sequence derived from Cas9
  REGION 1567..1588: note = MISC_FEATURE - Bipartite nuclear localization sequence
MSEVEFSHEYWMRHALTLAKRARDEREVPVGAVLVLNNRVIGEGWNRAIGLHDPTAHAEIMALRQGGLVMQNYRLIDATLYSTFEPCVMCAGAMIHSRIGRVVFGVRNAKTGAAGSLMDVLHYPGMNHRVEITEGILADECAALLCYFFRMPRRVFNAQKKAQSSTDSGGSSGGSSGSETPGTSESATPESSGGSSGGSDKKYSIGLAIGTNSVGWAVITDEYKVPSKKFKVLGNTDRHSIKKNLIGALLFDSGETAEATRLKRTARRRYTRRKNRICYLQEIFSNEMAKVDDSFFHRLEESFLVEEDKKHERHPIFGNIVDEVAYHEKYPTIYHLRKKLVDSTDKADLRLIYLALAHMIKFRGHFLIEGDLNPDNSDVDKLFIQLVQTYNQLFEENPINASGVDAKAILSARLSKSRRLENLIAQLPGEKKNGLFGNLIALSLGLTPNFKSNFDLAEDAKLQLSKDTYDDDLDNLLAQIGDQYADLFLAAKNLSDAILLSDILRVNTEITKAPLSASMIKRYDEHHQDLTLLKALVRQQLPEKYKEIFFDQSKNGYAGYIDGGASQEEFYKFIKPILEKMDGTEELLVKLNREDLLRKQRTFDNGSIPHQIHLGELHAILRRQEDFYPFLKDNREKIEKILTFRIPYYVGPLARGNSRFAWMTRKSEETITPWNFEEVVDKGASAQSFIERMTNFDKNLPNEKVLPKHSLLYEYFTVYNELTKVKYVTEGMRKPAFLSGEQKKAIVDLLFKTNRKVTVKQLKEDYFKKIECFDSVEISGVEDRFNASLGTYHDLLKIIKDKDFLDNEENEDILEDIVLTLTLFEDREMIEERLKTYAHLFDDKVMKQLKRRRYTGWGRLSRKLINGIRDKQSGKTILDFLKSDGFANRNFMQLIHDDSLTFKEDIQKAQVSGQGDSLHEHIANLAGSPAIKKGILQTVKVVDELVKVMGRHKPENIVIEMARENQTTQKGQKNSRERMKRIEEGIKELGSQILKEHPVENTQLQNEKLYLYYLQNGRDMYVDQELDINRLSDYDVDHIVPQSFLKDDSIDNKVLTRSDKNRGKSDNVPSEEVVKKMKNYWRQLLNAKLITQRKFDNLTKAERGGLSELDKAGFIKRQLVETRQITKHVAQILDSRMNTKYDENDKLIREVKVITLKSKLVSDFRKDFQFYKVREINNYHHAHDAYLNAVVGTALIKKYPKLESEFVYGDYKVYDVRKMIAKSEQEIGKATAKYFFYSNIMNFFKTEITLANGEIRKRPLIETNGETGEIVWDKGRDFATVRKVLSMPQVNIVKKTEVQTGGFSKESILPKRNSDKLIARKKDWDPKKYGGFDSPTVAYSVLVVAKVEKGKSKKLKSVKELLGITIMERSSFEKNPIDFLEAKGYKEVKKDLIIKLPKYSLFELENGRKRMLASAGELQKGNELALPSKYVNFLYLASHYEKLKGSPEDNEQKQLFVEQHKHYLDEIIEQISEFSKRVILADANLDKVLSAYNKHRDKPIREQAENIIHLFTLTNLGAPAAFKYFDTTIDRKRYTSTKEVLDATLIHQSITGLYETRIDLSQLGGDEGADKRTADGSEFESPKKKRKV

SEQ ID NO: 338 - protein, 1786 aa, synthetic construct
  REGION 1..1786: note = ABE8.17-d polypeptide sequence
  REGION 1..167: note = MISC_FEATURE - Adenosine deaminase sequence
  REGION 168..199: note = MISC_FEATURE - Linker sequence
  REGION 200..365: note = MISC_FEATURE - Adenosine deaminase sequence
  REGION 366..397: note = MISC_FEATURE - Linker sequence
  REGION 398..1764: note = MISC_FEATURE - Sequence derived from Cas9
  REGION 1765..1786: note = MISC_FEATURE - Bipartite nuclear localization sequence
MSEVEFSHEYWMRHALTLAKRAWDEREVPVGAVLVHNNRVIGEGWNRPIGRHDPTAHAEIMALRQGGLVMQNYRLIDATLYVTLEPCVMCAGAMIHSRIGRVVFGARDAKTGAAGSLMDVLHHPGMNHRVEITEGILADECAALLSDFFRMRRQEIKAQKKAQSSTDSGGSSGGSSGSETPGTSESATPESSGGSSGGSSEVEFSHEYWMRHALTLAKRARDEREVPVGAVLVLNNRVIGEGWNRAIGLHDPTAHAEIMALRQGGLVMQNYRLIDATLYSTFEPCVMCAGAMIHSRIGRVVFGVRNAKTGAAGSLMDVLHYPGMNHRVEITEGILADECAALLCYFFRMPRRVFNAQKKAQSSTDSGGSSGGSSGSETPGTSESATPESSGGSSGGSDKKYSIGLAIGTNSVGWAVITDEYKVPSKKFKVLGNTDRHSIKKNLIGALLFDSGETAEATRLKRTARRRYTRRKNRICYLQEIFSNEMAKVDDSFFHRLEESFLVEEDKKHERHPIFGNIVDEVAYHEKYPTIYHLRKKLVDSTDKADLRLIYLALAHMIKFRGHFLIEGDLNPDNSDVDKLFIQLVQTYNQLFEENPINASGVDAKAILSARLSKSRRLENLIAQLPGEKKNGLFGNLIALSLGLTPNFKSNFDLAEDAKLQLSKDTYDDDLDNLLAQIGDQYADLFLAAKNLSDAILLSDILRVNTEITKAPLSASMIKRYDEHHQDLTLLKALVRQQLPEKYKEIFFDQSKNGYAGYIDGGASQEEFYKFIKPILEKMDGTEELLVKLNREDLLRKQRTFDNGSIPHQIHLGELHAILRRQEDFYPFLKDNREKIEKILTFRIPYYVGPLARGNSRFAWMTRKSEETITPWNFEEVVDKGASAQSFIERMTNFDKNLPNEKVLPKHSLLYEYFTVYNELTKVKYVTEGMRKPAFLSGEQKKAIVDLLFKTNRKVTVKQLKEDYFKKIECFDSVEISGVEDRFNASLGTYHDLLKIIKDKDFLDNEENEDILEDIVLTLTLFEDREMIEERLKTYAHLFDDKVMKQLKRRRYTGWGRLSRKLINGIRDKQSGKTILDFLKSDGFANRNFMQLIHDDSLTFKEDIQKAQVSGQGDSLHEHIANLAGSPAIKKGILQTVKVVDELVKVMGRHKPENIVIEMARENQTTQKGQKNSRERMKRIEEGIKELGSQILKEHPVENTQLQNEKLYLYYLQNGRDMYVDQELDINRLSDYDVDHIVPQSFLKDDSIDNKVLTRSDKNRGKSDNVPSEEVVKKMKNYWRQLLNAKLITQRKFDNLTKAERGGLSELDKAGFIKRQLVETRQITKHVAQILDSRMNTKYDENDKLIREVKVITLKSKLVSDFRKDFQFYKVREINNYHHAHDAYLNAVVGTALIKKYPKLESEFVYGDYKVYDVRKMIAKSEQEIGKATAKYFFYSNIMNFFKTEITLANGEIRKRPLIETNGETGEIVWDKGRDFATVRKVLSMPQVNIVKKTEVQTGGFSKESILPKRNSDKLIARKKDWDPKKYGGFDSPTVAYSVLVVAKVEKGKSKKLKSVKELLGITIMERSSFEKNPIDFLEAKGYKEVKKDLIIKLPKYSLFELENGRKRMLASAGELQKGNELALPSKYVNFLYLASHYEKLKGSPEDNEQKQLFVEQHKHYLDEIIEQISEFSKRVILADANLDKVLSAYNKHRDKPIREQAENIIHLFTLTNLGAPAAFKYFDTTIDRKRYTSTKEVLDATLIHQSITGLYETRIDLSQLGGDEGADKRTADGSEFESPKKKRKV

SEQ ID NO: 339 - protein, 1588 aa, synthetic construct
  REGION 1..1588: note = ABE8.20-m polypeptide sequence
  REGION 1..167: note = MISC_FEATURE - Adenosine deaminase sequence
  REGION 168..199: note = MISC_FEATURE - Linker sequence
  REGION 200..1566: note = MISC_FEATURE - Sequence derived from Cas9
  REGION 1567..1588: note = MISC_FEATURE - Bipartite nuclear localization sequence
MSEVEFSHEYWMRHALTLAKRARDEREVPVGAVLVLNNRVIGEGWNRAIGLHDPTAHAEIMALRQGGLVMQNYRLYDATLYSTFEPCVMCAGAMIHSRIGRVVFGVRNAKTGAAGSLMDVLHHPGMNHRVEITEGILADECAALLCRFFRMPRRVFNAQKKAQSSTDSGGSSGGSSGSETPGTSESATPESSGGSSGGSDKKYSIGLAIGTNSVGWAVITDEYKVPSKKFKVLGNTDRHSIKKNLIGALLFDSGETAEATRLKRTARRRYTRRKNRICYLQEIFSNEMAKVDDSFFHRLEESFLVEEDKKHERHPIFGNIVDEVAYHEKYPTIYHLRKKLVDSTDKADLRLIYLALAHMIKFRGHFLIEGDLNPDNSDVDKLFIQLVQTYNQLFEENPINASGVDAKAILSARLSKSRRLENLIAQLPGEKKNGLFGNLIALSLGLTPNFKSNFDLAEDAKLQLSKDTYDDDLDNLLAQIGDQYADLFLAAKNLSDAILLSDILRVNTEITKAPLSASMIKRYDEHHQDLTLLKALVRQQLPEKYKEIFFDQSKNGYAGYIDGGASQEEFYKFIKPILEKMDGTEELLVKLNREDLLRKQRTFDNGSIPHQIHLGELHAILRRQEDFYPFLKDNREKIEKILTFRIPYYVGPLARGNSRFAWMTRKSEETITPWNFEEVVDKGASAQSFIERMTNFDKNLPNEKVLPKHSLLYEYFTVYNELTKVKYVTEGMRKPAFLSGEQKKAIVDLLFKTNRKVTVKQLKEDYFKKIECFDSVEISGVEDRFNASLGTYHDLLKIIKDKDFLDNEENEDILEDIVLTLTLFEDREMIEERLKTYAHLFDDKVMKQLKRRRYTGWGRLSRKLINGIRDKQSGKTILDFLKSDGFANRNFMQLIHDDSLTFKEDIQKAQVSGQGDSLHEHIANLAGSPAIKKGILQTVKVVDELVKVMGRHKPENIVIEMARENQTTQKGQKNSRERMKRIEEGIKELGSQILKEHPVENTQLQNEKLYLYYLQNGRDMYVDQELDINRLSDYDVDHIVPQSFLKDDSIDNKVLTRSDKNRGKSDNVPSEEVVKKMKNYWRQLLNAKLITQRKFDNLTKAERGGLSELDKAGFIKRQLVETRQITKHVAQILDSRMNTKYDENDKLIREVKVITLKSKLVSDFRKDFQFYKVREINNYHHAHDAYLNAVVGTALIKKYPKLESEFVYGDYKVYDVRKMIAKSEQEIGKATAKYFFYSNIMNFFKTEITLANGEIRKRPLIETNGETGEIVWDKGRDFATVRKVLSMPQVNIVKKTEVQTGGFSKESILPKRNSDKLIARKKDWDPKKYGGFDSPTVAYSVLVVAKVEKGKSKKLKSVKELLGITIMERSSFEKNPIDFLEAKGYKEVKKDLIIKLPKYSLFELENGRKRMLASAGELQKGNELALPSKYVNFLYLASHYEKLKGSPEDNEQKQLFVEQHKHYLDEIIEQISEFSKRVILADANLDKVLSAYNKHRDKPIREQAENIIHLFTLTNLGAPAAFKYFDTTIDRKRYTSTKEVLDATLIHQSITGLYETRIDLSQLGGDEGADKRTADGSEFESPKKKRKV

SEQ ID NO: 340 - protein, 1786 aa, synthetic construct
  REGION 1..1786: note = ABE8.20-d polypeptide sequence
  REGION 1..167: note = MISC_FEATURE - Adenosine deaminase sequence
  REGION 168..199: note = MISC_FEATURE - Linker sequence
  REGION 200..365: note = MISC_FEATURE - Adenosine deaminase sequence
  REGION 366..397: note = MISC_FEATURE - Linker sequence
  REGION 398..1764: note = MISC_FEATURE - Sequence derived from Cas9
  REGION 1765..1786: note = MISC_FEATURE - Bipartite nuclear localization sequence
MSEVEFSHEYWMRHALTLAKRAWDEREVPVGAVLVHNNRVIGEGWNRPIGRHDPTAHAEIMALRQGGLVMQNYRLIDATLYVTLEPCVMCAGAMIHSRIGRVVFGARDAKTGAAGSLMDVLHHPGMNHRVEITEGILADECAALLSDFFRMRRQEIKAQKKAQSSTDSGGSSGGSSGSETPGTSESATPESSGGSSGGSSEVEFSHEYWMRHALTLAKRARDEREVPVGAVLVLNNRVIGEGWNRAIGLHDPTAHAEIMALRQGGLVMQNYRLYDATLYSTFEPCVMCAGAMIHSRIGRVVFGVRNAKTGAAGSLMDVLHHPGMNHRVEITEGILADECAALLCRFFRMPRRVFNAQKKAQSSTDSGGSSGGSSGSETPGTSESATPESSGGSSGGSDKKYSIGLAIGTNSVGWAVITDEYKVPSKKFKVLGNTDRHSIKKNLIGALLFDSGETAEATRLKRTARRRYTRRKNRICYLQEIFSNEMAKVDDSFFHRLEESFLVEEDKKHERHPIFGNIVDEVAYHEKYPTIYHLRKKLVDSTDKADLRLIYLALAHMIKFRGHFLIEGDLNPDNSDVDKLFIQLVQTYNQLFEENPINASGVDAKAILSARLSKSRRLENLIAQLPGEKKNGLFGNLIALSLGLTPNFKSNFDLAEDAKLQLSKDTYDDDLDNLLAQIGDQYADLFLAAKNLSDAILLSDILRVNTEITKAPLSASMIKRYDEHHQDLTLLKALVRQQLPEKYKEIFFDQSKNGYAGYIDGGASQEEFYKFIKPILEKMDGTEELLVKLNREDLLRKQRTFDNGSIPHQIHLGELHAILRRQEDFYPFLKDNREKIEKILTFRIPYYVGPLARGNSRFAWMTRKSEETITPWNFEEVVDKGASAQSFIERMTNFDKNLPNEKVLPKHSLLYEYFTVYNELTKVKYVTEGMRKPAFLSGEQKKAIVDLLFKTNRKVTVKQLKEDYFKKIECFDSVEISGVEDRFNASLGTYHDLLKIIKDKDFLDNEENEDILEDIVLTLTLFEDREMIEERLKTYAHLFDDKVMKQLKRRRYTGWGRLSRKLINGIRDKQSGKTILDFLKSDGFANRNFMQLIHDDSLTFKEDIQKAQVSGQGDSLHEHIANLAGSPAIKKGILQTVKVVDELVKVMGRHKPENIVIEMARENQTTQKGQKNSRERMKRIEEGIKELGSQILKEHPVENTQLQNEKLYLYYLQNGRDMYVDQELDINRLSDYDVDHIVPQSFLKDDSIDNKVLTRSDKNRGKSDNVPSEEVVKKMKNYWRQLLNAKLITQRKFDNLTKAERGGLSELDKAGFIKRQLVETRQITKHVAQILDSRMNTKYDENDKLIREVKVITLKSKLVSDFRKDFQFYKVREINNYHHAHDAYLNAVVGTALIKKYPKLESEFVYGDYKVYDVRKMIAKSEQEIGKATAKYFFYSNIMNFFKTEITLANGEIRKRPLIETNGETGEIVWDKGRDFATVRKVLSMPQVNIVKKTEVQTGGFSKESILPKRNSDKLIARKKDWDPKKYGGFDSPTVAYSVLVVAKVEKGKSKKLKSVKELLGITIMERSSFEKNPIDFLEAKGYKEVKKDLIIKLPKYSLFELENGRKRMLASAGELQKGNELALPSKYVNFLYLASHYEKLKGSPEDNEQKQLFVEQHKHYLDEIIEQISEFSKRVILADANLDKVLSAYNKHRDKPIREQAENIIHLFTLTNLGAPAAFKYFDTTIDRKRYTSTKEVLDATLIHQSITGLYETRIDLSQLGGDEGADKRTADGSEFESPKKKRKV

SEQ ID NO: 341 - protein, 1588 aa, synthetic construct
  REGION 1..1588: note = 01. monoABE8.1_bpNLS + Y147T polypeptide sequence
MSEVEFSHEYWMRHALTLAKRARDEREVPVGAVLVLNNRVIGEGWNRAIGLHDPTAHAEIMALRQGGLVMQNYRLIDATLYVTFEPCVMCAGAMIHSRIGRVVFGVRNAKTGAAGSLMDVLHYPGMNHRVEITEGILADECAALLCTFFRMPRQVFNAQKKAQSSTDSGGSSGGSSGSETPGTSESATPESSGGSSGGSDKKYSIGLAIGTNSVGWAVITDEYKVPSKKFKVLGNTDRHSIKKNLIGALLFDSGETAEATRLKRTARRRYTRRKNRICYLQEIFSNEMAKVDDSFFHRLEESFLVEEDKKHERHPIFGNIVDEVAYHEKYPTIYHLRKKLVDSTDKADLRLIYLALAHMIKFRGHFLIEGDLNPDNSDVDKLFIQLVQTYNQLFEENPINASGVDAKAILSARLSKSRRLENLIAQLPGEKKNGLFGNLIALSLGLTPNFKSNFDLAEDAKLQLSKDTYDDDLDNLLAQIGDQYADLFLAAKNLSDAILLSDILRVNTEITKAPLSASMIKRYDEHHQDLTLLKALVRQQLPEKYKEIFFDQSKNGYAGYIDGGASQEEFYKFIKPILEKMDGTEELLVKLNREDLLRKQRTFDNGSIPHQIHLGELHAILRRQEDFYPFLKDNREKIEKILTFRIPYYVGPLARGNSRFAWMTRKSEETITPWNFEEVVDKGASAQSFIERMTNFDKNLPNEKVLPKHSLLYEYFTVYNELTKVKYVTEGMRKPAFLSGEQKKAIVDLLFKTNRKVTVKQLKEDYFKKIECFDSVEISGVEDRFNASLGTYHDLLKIIKDKDFLDNEENEDILEDIVLTLTLFEDREMIEERLKTYAHLFDDKVMKQLKRRRYTGWGRLSRKLINGIRDKQSGKTILDFLKSDGFANRNFMQLIHDDSLTFKEDIQKAQVSGQGDSLHEHIANLAGSPAIKKGILQTVKVVDELVKVMGRHKPENIVIEMARENQTTQKGQKNSRERMKRIEEGIKELGSQILKEHPVENTQLQNEKLYLYYLQNGRDMYVDQELDINRLSDYDVDHIVPQSFLKDDSIDNKVLTRSDKNRGKSDNVPSEEVVKKMKNYWRQLLNAKLITQRKFDNLTKAERGGLSELDKAGFIKRQLVETRQITKHVAQILDSRMNTKYDENDKLIREVKVITLKSKLVSDFRKDFQFYKVREINNYHHAHDAYLNAVVGTALIKKYPKLESEFVYGDYKVYDVRKMIAKSEQEIGKATAKYFFYSNIMNFFKTEITLANGEIRKRPLIETNGETGEIVWDKGRDFATVRKVLSMPQVNIVKKTEVQTGGFSKESILPKRNSDKLIARKKDWDPKKYGGFVSPTVAYSVLVVAKVEKGKSKKLKSVKELLGITIMERSSFEKNPIDFLEAKGYKEVKKDLIIKLPKYSLFELENGRKRMLASARELQKGNELALPSKYVNFLYLASHYEKLKGSPEDNEQKQLFVEQHKHYLDEIIEQISEFSKRVILADANLDKVLSAYNKHRDKPIREQAENIIHLFTLTNLGAPAAFKYFDTTIDRKQYRSTKEVLDATLIHQSITGLYETRIDLSQLGGDEGADKRTADGSEFESPKKKRKV

SEQ ID NO: 342 - protein, 1588 aa, synthetic construct
  REGION 1..1588: note = 02. monoABE8.1_bpNLS + Y147R polypeptide sequence
MSEVEFSHEYWMRHALTLAKRARDEREVPVGAVLVLNNRVIGEGWNRAIGLHDPTAHAEIMALRQGGLVMQNYRLIDATLYVTFEPCVMCAGAMIHSRIGRVVFGVRNAKTGAAGSLMDVLHYPGMNHRVEITEGILADECAALLCRFFRMPRQVFNAQKKAQSSTDSGGSSGGSSGSETPGTSESATPESSGGSSGGSDKKYSIGLAIGTNSVGWAVITDEYKVPSKKFKVLGNTDRHSIKKNLIGALLFDSGETAEATRLKRTARRRYTRRKNRICYLQEIFSNEMAKVDDSFFHRLEESFLVEEDKKHERHPIFGNIVDEVAYHEKYPTIYHLRKKLVDSTDKADLRLIYLALAHMIKFRGHFLIEGDLNPDNSDVDKLFIQLVQTYNQLFEENPINASGVDAKAILSARLSKSRRLENLIAQLPGEKKNGLFGNLIALSLGLTPNFKSNFDLAEDAKLQLSKDTYDDDLDNLLAQIGDQYADLFLAAKNLSDAILLSDILRVNTEITKAPLSASMIKRYDEHHQDLTLLKALVRQQLPEKYKEIFFDQSKNGYAGYIDGGASQEEFYKFIKPILEKMDGTEELLVKLNREDLLRKQRTFDNGSIPHQIHLGELHAILRRQEDFYPFLKDNREKIEKILTFRIPYYVGPLARGNSRFAWMTRKSEETITPWNFEEVVDKGASAQSFIERMTNFDKNLPNEKVLPKHSLLYEYFTVYNELTKVKYVTEGMRKPAFLSGEQKKAIVDLLFKTNRKVTVKQLKEDYFKKIECFDSVEISGVEDRFNASLGTYHDLLKIIKDKDFLDNEENEDILEDIVLTLTLFEDREMIEERLKTYAHLFDDKVMKQLKRRRYTGWGRLSRKLINGIRDKQSGKTILDFLKSDGFANRNFMQLIHDDSLTFKEDIQKAQVSGQGDSLHEHIANLAGSPAIKKGILQTVKVVDELVKVMGRHKPENIVIEMARENQTTQKGQKNSRERMKRIEEGIKELGSQILKEHPVENTQLQNEKLYLYYLQNGRDMYVDQELDINRLSDYDVDHIVPQSFLKDDSIDNKVLTRSDKNRGKSDNVPSEEVVKKMKNYWRQLLNAKLITQRKFDNLTKAERGGLSELDKAGFIKRQLVETRQITKHVAQILDSRMNTKYDENDKLIREVKVITLKSKLVSDFRKDFQFYKVREINNYHHAHDAYLNAVVGTALIKKYPKLESEFVYGDYKVYDVRKMIAKSEQEIGKATAKYFFYSNIMNFFKTEITLANGEIRKRPLIETNGETGEIVWDKGRDFATVRKVLSMPQVNIVKKTEVQTGGFSKESILPKRNSDKLIARKKDWDPKKYGGFVSPTVAYSVLVVAKVEKGKSKKLKSVKELLGITIMERSSFEKNPIDFLEAKGYKEVKKDLIIKLPKYSLFELENGRKRMLASARELQKGNELALPSKYVNFLYLASHYEKLKGSPEDNEQKQLFVEQHKHYLDEIIEQISEFSKRVILADANLDKVLSAYNKHRDKPIREQAENIIHLFTLTNLGAPAAFKYFDTTIDRKQYRSTKEVLDATLIHQSITGLYETRIDLSQLGGDEGADKRTADGSEFESPKKKRKV

SEQ ID NO: 343 - protein, 1588 aa, synthetic construct
  REGION 1..1588: note = 03. monoABE8.1_bpNLS + Q154S polypeptide sequence
MSEVEFSHEYWMRHALTLAKRARDEREVPVGAVLVLNNRVIGEGWNRAIGLHDPTAHAEIMALRQGGLVMQNYRLIDATLYVTFEPCVMCAGAMIHSRIGRVVFGVRNAKTGAAGSLMDVLHYPGMNHRVEITEGILADECAALLCYFFRMPRSVFNAQKKAQSSTDSGGSSGGSSGSETPGTSESATPESSGGSSGGSDKKYSIGLAIGTNSVGWAVITDEYKVPSKKFKVLGNTDRHSIKKNLIGALLFDSGETAEATRLKRTARRRYTRRKNRICYLQEIFSNEMAKVDDSFFHRLEESFLVEEDKKHERHPIFGNIVDEVAYHEKYPTIYHLRKKLVDSTDKADLRLIYLALAHMIKFRGHFLIEGDLNPDNSDVDKLFIQLVQTYNQLFEENPINASGVDAKAILSARLSKSRRLENLIAQLPGEKKNGLFGNLIALSLGLTPNFKSNFDLAEDAKLQLSKDTYDDDLDNLLAQIGDQYADLFLAAKNLSDAILLSDILRVNTEITKAPLSASMIKRYDEHHQDLTLLKALVRQQLPEKYKEIFFDQSKNGYAGYIDGGASQEEFYKFIKPILEKMDGTEELLVKLNREDLLRKQRTFDNGSIPHQIHLGELHAILRRQEDFYPFLKDNREKIEKILTFRIPYYVGPLARGNSRFAWMTRKSEETITPWNFEEVVDKGASAQSFIERMTNFDKNLPNEKVLPKHSLLYEYFTVYNELTKVKYVTEGMRKPAFLSGEQKKAIVDLLFKTNRKVTVKQLKEDYFKKIECFDSVEISGVEDRFNASLGTYHDLLKIIKDKDFLDNEENEDILEDIVLTLTLFEDREMIEERLKTYAHLFDDKVMKQLKRRRYTGWGRLSRKLINGIRDKQSGKTILDFLKSDGFANRNFMQLIHDDSLTFKEDIQKAQVSGQGDSLHEHIANLAGSPAIKKGILQTVKVVDELVKVMGRHKPENIVIEMARENQTTQKGQKNSRERMKRIEEGIKELGSQILKEHPVENTQLQNEKLYLYYLQNGRDMYVDQELDINRLSDYDVDHIVPQSFLKDDSIDNKVLTRSDKNRGKSDNVPSEEVVKKMKNYWRQLLNAKLITQRKFDNLTKAERGGLSELDKAGFIKRQLVETRQITKHVAQILDSRMNTKYDENDKLIREVKVITLKSKLVSDFRKDFQFYKVREINNYHHAHDAYLNAVVGTALIKKYPKLESEFVYGDYKVYDVRKMIAKSEQEIGKATAKYFFYSNIMNFFKTEITLANGEIRKRPLIETNGETGEIVWDKGRDFATVRKVLSMPQVNIVKKTEVQTGGFSKESILPKRNSDKLIARKKDWDPKKYGGFVSPTVAYSVLVVAKVEKGKSKKLKSVKELLGITIMERSSFEKNPIDFLEAKGYKEVKKDLIIKLPKYSLFELENGRKRMLASARELQKGNELALPSKYVNFLYLASHYEKLKGSPEDNEQKQLFVEQHKHYLDEIIEQISEFSKRVILADANLDKVLSAYNKHRDKPIREQAENIIHLFTLTNLGAPAAFKYFDTTIDRKQYRSTKEVLDATLIHQSITGLYETRIDLSQLGGDEGADKRTADGSEFESPKKKRKV

SEQ ID NO: 344 - protein, 1588 aa, synthetic construct
  REGION 1..1588: note = 04. monoABE8.1_bpNLS + Y123H polypeptide sequence
MSEVEFSHEYWMRHALTLAKRARDEREVPVGAVLVLNNRVIGEGWNRAIGLHDPTAHAEIMALRQGGLVMQNYRLIDATLYVTFEPCVMCAGAMIHSRIGRVVFGVRNAKTGAAGSLMDVLHHPGMNHRVEITEGILADECAALLCYFFRMPRQVFNAQKKAQSSTDSGGSSGGSSGSETPGTSESATPESSGGSSGGSDKKYSIGLAIGTNSVGWAVITDEYKVPSKKFKVLGNTDRHSIKKNLIGALLFDSGETAEATRLKRTARRRYTRRKNRICYLQEIFSNEMAKVDDSFFHRLEESFLVEEDKKHERHPIFGNIVDEVAYHEKYPTIYHLRKKLVDSTDKADLRLIYLALAHMIKFRGHFLIEGDLNPDNSDVDKLFIQLVQTYNQLFEENPINASGVDAKAILSARLSKSRRLENLIAQLPGEKKNGLFGNLIALSLGLTPNFKSNFDLAEDAKLQLSKDTYDDDLDNLLAQIGDQYADLFLAAKNLSDAILLSDILRVNTEITKAPLSASMIKRYDEHHQDLTLLKALVRQQLPEKYKEIFFDQSKNGYAGYIDGGASQEEFYKFIKPILEKMDGTEELLVKLNREDLLRKQRTFDNGSIPHQIHLGELHAILRRQEDFYPFLKDNREKIEKILTFRIPYYVGPLARGNSRFAWMTRKSEETITPWNFEEVVDKGASAQSFIERMTNFDKNLPNEKVLPKHSLLYEYFTVYNELTKVKYVTEGMRKPAFLSGEQKKAIVDLLFKTNRKVTVKQLKEDYFKKIECFDSVEISGVEDRFNASLGTYHDLLKIIKDKDFLDNEENEDILEDIVLTLTLFEDREMIEERLKTYAHLFDDKVMKQLKRRRYTGWGRLSRKLINGIRDKQSGKTILDFLKSDGFANRNFMQLIHDDSLTFKEDIQKAQVSGQGDSLHEHIANLAGSPAIKKGILQTVKVVDELVKVMGRHKPENIVIEMARENQTTQKGQKNSRERMKRIEEGIKELGSQILKEHPVENTQLQNEKLYLYYLQNGRDMYVDQELDINRLSDYDVDHIVPQSFLKDDSIDNKVLTRSDKNRGKSDNVPSEEVVKKMKNYWRQLLNAKLITQRKFDNLTKAERGGLSELDKAGFIKRQLVETRQITKHVAQILDSRMNTKYDENDKLIREVKVITLKSKLVSDFRKDFQFYKVREINNYHHAHDAYLNAVVGTALIKKYPKLESEFVYGDYKVYDVRKMIAKSEQEIGKATAKYFFYSNIMNFFKTEITLANGEIRKRPLIETNGETGEIVWDKGRDFATVRKVLSMPQVNIVKKTEVQTGGFSKESILPKRNSDKLIARKKDWDPKKYGGFVSPTVAYSVLVVAKVEKGKSKKLKSVKELLGITIMERSSFEKNPIDFLEAKGYKEVKKDLIIKLPKYSLFELENGRKRMLASARELQKGNELALPSKYVNFLYLASHYEKLKGSPEDNEQKQLFVEQHKHYLDEIIEQISEFSKRVILADANLDKVLSAYNKHRDKPIREQAENIIHLFTLTNLGAPAAFKYFDTTIDRKQYRSTKEVLDATLIHQSITGLYETRIDLSQLGGDEGADKRTADGSEFESPKKKRKV

SEQ ID NO: 345 - protein, 1588 aa, synthetic construct
  REGION 1..1588: note = 05. monoABE8.1_bpNLS + V82S polypeptide sequence
MSEVEFSHEYWMRHALTLAKRARDEREVPVGAVLVLNNRVIGEGWNRAIGLHDPTAHAEIMALRQGGLVMQNYRLIDATLYSTFEPCVMCAGAMIHSRIGRVVFGVRNAKTGAAGSLMDVLHYPGMNHRVEITEGILADECAALLCYFFRMPRQVFNAQKKAQSSTDSGGSSGGSSGSETPGTSESATPESSGGSSGGSDKKYSIGLAIGTNSVGWAVITDEYKVPSKKFKVLGNTDRHSIKKNLIGALLFDSGETAEATRLKRTARRRYTRRKNRICYLQEIFSNEMAKVDDSFFHRLEESFLVEEDKKHERHPIFGNIVDEVAYHEKYPTIYHLRKKLVDSTDKADLRLIYLALAHMIKFRGHFLIEGDLNPDNSDVDKLFIQLVQTYNQLFEENPINASGVDAKAILSARLSKSRRLENLIAQLPGEKKNGLFGNLIALSLGLTPNFKSNFDLAEDAKLQLSKDTYDDDLDNLLAQIGDQYADLFLAAKNLSDAILLSDILRVNTEITKAPLSASMIKRYDEHHQDLTLLKALVRQQLPEKYKEIFFDQSKNGYAGYIDGGASQEEFYKFIKPILEKMDGTEELLVKLNREDLLRKQRTFDNGSIPHQIHLGELHAILRRQEDFYPFLKDNREKIEKILTFRIPYYVGPLARGNSRFAWMTRKSEETITPWNFEEVVDKGASAQSFIERMTNFDKNLPNEKVLPKHSLLYEYFTVYNELTKVKYVTEGMRKPAFLSGEQKKAIVDLLFKTNRKVTVKQLKEDYFKKIECFDSVEISGVEDRFNASLGTYHDLLKIIKDKDFLDNEENEDILEDIVLTLTLFEDREMIEERLKTYAHLFDDKVMKQLKRRRYTGWGRLSRKLINGIRDKQSGKTILDFLKSDGFANRNFMQLIHDDSLTFKEDIQKAQVSGQGDSLHEHIANLAGSPAIKKGILQTVKVVDELVKVMGRHKPENIVIEMARENQTTQKGQKNSRERMKRIEEGIKELGSQILKEHPVENTQLQNEKLYLYYLQNGRDMYVDQELDINRLSDYDVDHIVPQSFLKDDSIDNKVLTRSDKNRGKSDNVPSEEVVKKMKNYWRQLLNAKLITQRKFDNLTKAERGGLSELDKAGFIKRQLVETRQITKHVAQILDSRMNTKYDENDKLIREVKVITLKSKLVSDFRKDFQFYKVREINNYHHAHDAYLNAVVGTALIKKYPKLESEFVYGDYKVYDVRKMIAKSEQEIGKATAKYFFYSNIMNFFKTEITLANGEIRKRPLIETNGETGEIVWDKGRDFATVRKVLSMPQVNIVKKTEVQTGGFSKESILPKRNSDKLIARKKDWDPKKYGGFVSPTVAYSVLVVAKVEKGKSKKLKSVKELLGITIMERSSFEKNPIDFLEAKGYKEVKKDLIIKLPKYSLFELENGRKRMLASARELQKGNELALPSKYVNFLYLASHYEKLKGSPEDNEQKQLFVEQHKHYLDEIIEQISEFSKRVILADANLDKVLSAYNKHRDKPIREQAENIIHLFTLTNLGAPAAFKYFDTTIDRKQYRSTKEVLDATLIHQSITGLYETRIDLSQLGGDEGADKRTADGSEFESPKKKRKV

SEQ ID NO: 346 - protein, 1588 aa, synthetic construct
  REGION 1..1588: note = 06. monoABE8.1_bpNLS + T166R polypeptide sequence
MSEVEFSHEYWMRHALTLAKRARDEREVPVGAVLVLNNRVIGEGWNRAIGLHDPTAHAEIMALRQGGLVMQNYRLIDATLYVTFEPCVMCAGAMIHSRIGRVVFGVRNAKTGAAGSLMDVLHYPGMNHRVEITEGILADECAALLCYFFRMPRQVFNAQKKAQSSRDSGGSSGGSSGSETPGTSESATPESSGGSSGGSDKKYSIGLAIGTNSVGWAVITDEYKVPSKKFKVLGNTDRHSIKKNLIGALLFDSGETAEATRLKRTARRRYTRRKNRICYLQEIFSNEMAKVDDSFFHRLEESFLVEEDKKHERHPIFGNIVDEVAYHEKYPTIYHLRKKLVDSTDKADLRLIYLALAHMIKFRGHFLIEGDLNPDNSDVDKLFIQLVQTYNQLFEENPINASGVDAKAILSARLSKSRRLENLIAQLPGEKKNGLFGNLIALSLGLTPNFKSNFDLAEDAKLQLSKDTYDDDLDNLLAQIGDQYADLFLAAKNLSDAILLSDILRVNTEITKAPLSASMIKRYDEHHQDLTLLKALVRQQLPEKYKEIFFDQSKNGYAGYIDGGASQEEFYKFIKPILEKMDGTEELLVKLNREDLLRKQRTFDNGSIPHQIHLGELHAILRRQEDFYPFLKDNREKIEKILTFRIPYYVGPLARGNSRFAWMTRKSEETITPWNFEEVVDKGASAQSFIERMTNFDKNLPNEKVLPKHSLLYEYFTVYNELTKVKYVTEGMRKPAFLSGEQKKAIVDLLFKTNRKVTVKQLKEDYFKKIECFDSVEISGVEDRFNASLGTYHDLLKIIKDKDFLDNEENEDILEDIVLTLTLFEDREMIEERLKTYAHLFDDKVMKQLKRRRYTGWGRLSRKLINGIRDKQSGKTILDFLKSDGFANRNFMQLIHDDSLTFKEDIQKAQVSGQGDSLHEHIANLAGSPAIKKGILQTVKVVDELVKVMGRHKPENIVIEMARENQTTQKGQKNSRERMKRIEEGIKELGSQILKEHPVENTQLQNEKLYLYYLQNGRDMYVDQELDINRLSDYDVDHIVPQSFLKDDSIDNKVLTRSDKNRGKSDNVPSEEVVKKMKNYWRQLLNAKLITQRKFDNLTKAERGGLSELDKAGFIKRQLVETRQITKHVAQILDSRMNTKYDENDKLIREVKVITLKSKLVSDFRKDFQFYKVREINNYHHAHDAYLNAVVGTALIKKYPKLESEFVYGDYKVYDVRKMIAKSEQEIGKATAKYFFYSNIMNFFKTEITLANGEIRKRPLIETNGETGEIVWDKGRDFATVRKVLSMPQVNIVKKTEVQTGGFSKESILPKRNSDKLIARKKDWDPKKYGGFVSPTVAYSVLVVAKVEKGKSKKLKSVKELLGITIMERSSFEKNPIDFLEAKGYKEVKKDLIIKLPKYSLFELENGRKRMLASARELQKGNELALPSKYVNFLYLASHYEKLKGSPEDNEQKQLFVEQHKHYLDEIIEQISEFSKRVILADANLDKVLSAYNKHRDKPIREQAENIIHLFTLTNLGAPAAFKYFDTTIDRKQYRSTKEVLDATLIHQSITGLYETRIDLSQLGGDEGADKRTADGSEFESPKKKRKV

SEQ ID NO: 347 - protein, 1588 aa, synthetic construct
  REGION 1..1588: note = 07. monoABE8.1_bpNLS + Q154R polypeptide sequence
MSEVEFSHEYWMRHALTLAKRARDEREVPVGAVLVLNNRVIGEGWNRAIGLHDPTAHAEIMALRQGGLVMQNYRLIDATLYVTFEPCVMCAGAMIHSRIGRVVFGVRNAKTGAAGSLMDVLHYPGMNHRVEITEGILADECAALLCYFFRMPRRVFNAQKKAQSSTDSGGSSGGSSGSETPGTSESATPESSGGSSGGSDKKYSIGLAIGTNSVGWAVITDEYKVPSKKFKVLGNTDRHSIKKNLIGALLFDSGETAEATRLKRTARRRYTRRKNRICYLQEIFSNEMAKVDDSFFHRLEESFLVEEDKKHERHPIFGNIVDEVAYHEKYPTIYHLRKKLVDSTDKADLRLIYLALAHMIKFRGHFLIEGDLNPDNSDVDKLFIQLVQTYNQLFEENPINASGVDAKAILSARLSKSRRLENLIAQLPGEKKNGLFGNLIALSLGLTPNFKSNFDLAEDAKLQLSKDTYDDDLDNLLAQIGDQYADLFLAAKNLSDAILLSDILRVNTEITKAPLSASMIKRYDEHHQDLTLLKALVRQQLPEKYKEIFFDQSKNGYAGYIDGGASQEEFYKFIKPILEKMDGTEELLVKLNREDLLRKQRTFDNGSIPHQIHLGELHAILRRQEDFYPFLKDNREKIEKILTFRIPYYVGPLARGNSRFAWMTRKSEETITPWNFEEVVDKGASAQSFIERMTNFDKNLPNEKVLPKHSLLYEYFTVYNELTKVKYVTEGMRKPAFLSGEQKKAIVDLLFKTNRKVTVKQLKEDYFKKIECFDSVEISGVEDRFNASLGTYHDLLKIIKDKDFLDNEENEDILEDIVLTLTLFEDREMIEERLKTYAHLFDDKVMKQLKRRRYTGWGRLSRKLINGIRDKQSGKTILDFLKSDGFANRNFMQLIHDDSLTFKEDIQKAQVSGQGDSLHEHIANLAGSPAIKKGILQTVKVVDELVKVMGRHKPENIVIEMARENQTTQKGQKNSRERMKRIEEGIKELGSQILKEHPVENTQLQNEKLYLYYLQNGRDMYVDQELDINRLSDYDVDHIVPQSFLKDDSIDNKVLTRSDKNRGKSDNVPSEEVVKKMKNYWRQLLNAKLITQRKFDNLTKAERGGLSELDKAGFIKRQLVETRQITKHVAQILDSRMNTKYDENDKLIREVKVITLKSKLVSDFRKDFQFYKVREINNYHHAHDAYLNAVVGTALIKKYPKLESEFVYGDYKVYDVRKMIAKSEQEIGKATAKYFFYSNIMNFFKTEITLANGEIRKRPLIETNGETGEIVWDKGRDFATVRKVLSMPQVNIVKKTEVQTGGFSKESILPKRNSDKLIARKKDWDPKKYGGFVSPTVAYSVLVVAKVEKGKSKKLKSVKELLGITIMERSSFEKNPIDFLEAKGYKEVKKDLIIKLPKYSLFELENGRKRMLASARELQKGNELALPSKYVNFLYLASHYEKLKGSPEDNEQKQLFVEQHKHYLDEIIEQISEFSKRVILADANLDKVLSAYNKHRDKPIREQAENIIHLFTLTNLGAPAAFKYFDTTIDRKQYRSTKEVLDATLIHQSITGLYETRIDLSQLGGDEGADKRTADGSEFESPKKKRKV

SEQ ID NO: 348 - protein, 1588 aa, synthetic construct
  REGION 1..1588: note = 08. monoABE8.1_bpNLS +Y147R_Q154R_Y123H polypeptide sequence
MSEVEFSHEYWMRHALTLAKRARDEREVPVGAVLVLNNRVIGEGWNRAIGLHDPTAHAEIMALRQGGLVMQNYRLIDATLYVTFEPCVMCAGAMIHSRIGRVVFGVRNAKTGAAGSLMDVLHHPGMNHRVEITEGILADECAALLCRFFRMPRRVFNAQKKAQSSTDSGGSSGGSSGSETPGTSESATPESSGGSSGGSDKKYSIGLAIGTNSVGWAVITDEYKVPSKKFKVLGNTDRHSIKKNLIGALLFDSGETAEATRLKRTARRRYTRRKNRICYLQEIFSNEMAKVDDSFFHRLEESFLVEEDKKHERHPIFGNIVDEVAYHEKYPTIYHLRKKLVDSTDKADLRLIYLALAHMIKFRGHFLIEGDLNPDNSDVDKLFIQLVQTYNQLFEENPINASGVDAKAILSARLSKSRRLENLIAQLPGEKKNGLFGNLIALSLGLTPNFKSNFDLAEDAKLQLSKDTYDDDLDNLLAQIGDQYADLFLAAKNLSDAILLSDILRVNTEITKAPLSASMIKRYDEHHQDLTLLKALVRQQLPEKYKEIFFDQSKNGYAGYIDGGASQEEFYKFIKPILEKMDGTEELLVKLNREDLLRKQRTFDNGSIPHQIHLGELHAILRRQEDFYPFLKDNREKIEKILTFRIPYYVGPLARGNSRFAWMTRKSEETITPWNFEEVVDKGASAQSFIERMTNFDKNLPNEKVLPKHSLLYEYFTVYNELTKVKYVTEGMRKPAFLSGEQKKAIVDLLFKTNRKVTVKQLKEDYFKKIECFDSVEISGVEDRFNASLGTYHDLLKIIKDKDFLDNEENEDILEDIVLTLTLFEDREMIEERLKTYAHLFDDKVMKQLKRRRYTGWGRLSRKLINGIRDKQSGKTILDFLKSDGFANRNFMQLIHDDSLTFKEDIQKAQVSGQGDSLHEHIANLAGSPAIKKGILQTVKVVDELVKVMGRHKPENIVIEMARENQTTQKGQKNSRERMKRIEEGIKELGSQILKEHPVENTQLQNEKLYLYYLQNGRDMYVDQELDINRLSDYDVDHIVPQSFLKDDSIDNKVLTRSDKNRGKSDNVPSEEVVKKMKNYWRQLLNAKLITQRKFDNLTKAERGGLSELDKAGFIKRQLVETRQITKHVAQILDSRMNTKYDENDKLIREVKVITLKSKLVSDFRKDFQFYKVREINNYHHAHDAYLNAVVGTALIKKYPKLESEFVYGDYKVYDVRKMIAKSEQEIGKATAKYFFYSNIMNFFKTEITLANGEIRKRPLIETNGETGEIVWDKGRDFATVRKVLSMPQVNIVKKTEVQTGGFSKESILPKRNSDKLIARKKDWDPKKYGGFVSPTVAYSVLVVAKVEKGKSKKLKSVKELLGITIMERSSFEKNPIDFLEAKGYKEVKKDLIIKLPKYSLFELENGRKRMLASARELQKGNELALPSKYVNFLYLASHYEKLKGSPEDNEQKQLFVEQHKHYLDEIIEQISEFSKRVILADANLDKVLSAYNKHRDKPIREQAENIIHLFTLTNLGAPAAFKYFDTTIDRKQYRSTKEVLDATLIHQSITGLYETRIDLSQLGGDEGADKRTADGSEFESPKKKRKV

SEQ ID NO: 349 - protein, 1588 aa, synthetic construct
  REGION 1..1588: note = 09. monoABE8.1_bpNLS +Y147R_Q154R_I76Y polypeptide sequence
MSEVEFSHEYWMRHALTLAKRARDEREVPVGAVLVLNNRVIGEGWNRAIGLHDPTAHAEIMALRQGGLVMQNYRLYDATLYVTFEPCVMCAGAMIHSRIGRVVFGVRNAKTGAAGSLMDVLHYPGMNHRVEITEGILADECAALLCRFFRMPRRVFNAQKKAQSSTDSGGSSGGSSGSETPGTSESATPESSGGSSGGSDKKYSIGLAIGTNSVGWAVITDEYKVPSKKFKVLGNTDRHSIKKNLIGALLFDSGETAEATRLKRTARRRYTRRKNRICYLQEIFSNEMAKVDDSFFHRLEESFLVEEDKKHERHPIFGNIVDEVAYHEKYPTIYHLRKKLVDSTDKADLRLIYLALAHMIKFRGHFLIEGDLNPDNSDVDKLFIQLVQTYNQLFEENPINASGVDAKAILSARLSKSRRLENLIAQLPGEKKNGLFGNLIALSLGLTPNFKSNFDLAEDAKLQLSKDTYDDDLDNLLAQIGDQYADLFLAAKNLSDAILLSDILRVNTEITKAPLSASMIKRYDEHHQDLTLLKALVRQQLPEKYKEIFFDQSKNGYAGYIDGGASQEEFYKFIKPILEKMDGTEELLVKLNREDLLRKQRTFDNGSIPHQIHLGELHAILRRQEDFYPFLKDNREKIEKILTFRIPYYVGPLARGNSRFAWMTRKSEETITPWNFEEVVDKGASAQSFIERMTNFDKNLPNEKVLPKHSLLYEYFTVYNELTKVKYVTEGMRKPAFLSGEQKKAIVDLLFKTNRKVTVKQLKEDYFKKIECFDSVEISGVEDRFNASLGTYHDLLKIIKDKDFLDNEENEDILEDIVLTLTLFEDREMIEERLKTYAHLFDDKVMKQLKRRRYTGWGRLSRKLINGIRDKQSGKTILDFLKSDGFANRNFMQLIHDDSLTFKEDIQKAQVSGQGDSLHEHIANLAGSPAIKKGILQTVKVVDELVKVMGRHKPENIVIEMARENQTTQKGQKNSRERMKRIEEGIKELGSQILKEHPVENTQLQNEKLYLYYLQNGRDMYVDQELDINRLSDYDVDHIVPQSFLKDDSIDNKVLTRSDKNRGKSDNVPSEEVVKKMKNYWRQLLNAKLITQRKFDNLTKAERGGLSELDKAGFIKRQLVETRQITKHVAQILDSRMNTKYDENDKLIREVKVITLKSKLVSDFRKDFQFYKVREINNYHHAHDAYLNAVVGTALIKKYPKLESEFVYGDYKVYDVRKMIAKSEQEIGKATAKYFFYSNIMNFFKTEITLANGEIRKRPLIETNGETGEIVWDKGRDFATVRKVLSMPQVNIVKKTEVQTGGFSKESILPKRNSDKLIARKKDWDPKKYGGFVSPTVAYSVLVVAKVEKGKSKKLKSVKELLGITIMERSSFEKNPIDFLEAKGYKEVKKDLIIKLPKYSLFELENGRKRMLASARELQKGNELALPSKYVNFLYLASHYEKLKGSPEDNEQKQLFVEQHKHYLDEIIEQISEFSKRVILADANLDKVLSAYNKHRDKPIREQAENIIHLFTLTNLGAPAAFKYFDTTIDRKQYRSTKEVLDATLIHQSITGLYETRIDLSQLGGDEGADKRTADGSEFESPKKKRKV

SEQ ID NO: 350 - protein, 1588 aa, synthetic construct
  REGION 1..1588: note = 10. monoABE8.1_bpNLS +Y147R_Q154R_T166R polypeptide sequence
MSEVEFSHEYWMRHALTLAKRARDEREVPVGAVLVLNNRVIGEGWNRAIGLHDPTAHAEIMALRQGGLVMQNYRLIDATLYVTFEPCVMCAGAMIHSRIGRVVFGVRNAKTGAAGSLMDVLHYPGMNHRVEITEGILADECAALLCRFFRMPRRVFNAQKKAQSSRDSGGSSGGSSGSETPGTSESATPESSGGSSGGSDKKYSIGLAIGTNSVGWAVITDEYKVPSKKFKVLGNTDRHSIKKNLIGALLFDSGETAEATRLKRTARRRYTRRKNRICYLQEIFSNEMAKVDDSFFHRLEESFLVEEDKKHERHPIFGNIVDEVAYHEKYPTIYHLRKKLVDSTDKADLRLIYLALAHMIKFRGHFLIEGDLNPDNSDVDKLFIQLVQTYNQLFEENPINASGVDAKAILSARLSKSRRLENLIAQLPGEKKNGLFGNLIALSLGLTPNFKSNFDLAEDAKLQLSKDTYDDDLDNLLAQIGDQYADLFLAAKNLSDAILLSDILRVNTEITKAPLSASMIKRYDEHHQDLTLLKALVRQQLPEKYKEIFFDQSKNGYAGYIDGGASQEEFYKFIKPILEKMDGTEELLVKLNREDLLRKQRTFDNGSIPHQIHLGELHAILRRQEDFYPFLKDNREKIEKILTFRIPYYVGPLARGNSRFAWMTRKSEETITPWNFEEVVDKGASAQSFIERMTNFDKNLPNEKVLPKHSLLYEYFTVYNELTKVKYVTEGMRKPAFLSGEQKKAIVDLLFKTNRKVTVKQLKEDYFKKIECFDSVEISGVEDRFNASLGTYHDLLKIIKDKDFLDNEENEDILEDIVLTLTLFEDREMIEERLKTYAHLFDDKVMKQLKRRRYTGWGRLSRKLINGIRDKQSGKTILDFLKSDGFANRNFMQLIHDDSLTFKEDIQKAQVSGQGDSLHEHIANLAGSPAIKKGILQTVKVVDELVKVMGRHKPENIVIEMARENQTTQKGQKNSRERMKRIEEGIKELGSQILKEHPVENTQLQNEKLYLYYLQNGRDMYVDQELDINRLSDYDVDHIVPQSFLKDDSIDNKVLTRSDKNRGKSDNVPSEEVVKKMKNYWRQLLNAKLITQRKFDNLTKAERGGLSELDKAGFIKRQLVETRQITKHVAQILDSRMNTKYDENDKLIREVKVITLKSKLVSDFRKDFQFYKVREINNYHHAHDAYLNAVVGTALIKKYPKLESEFVYGDYKVYDVRKMIAKSEQEIGKATAKYFFYSNIMNFFKTEITLANGEIRKRPLIETNGETGEIVWDKGRDFATVRKVLSMPQVNIVKKTEVQTGGFSKESILPKRNSDKLIARKKDWDPKKYGGFVSPTVAYSVLVVAKVEKGKSKKLKSVKELLGITIMERSSFEKNPIDFLEAKGYKEVKKDLIIKLPKYSLFELENGRKRMLASARELQKGNELALPSKYVNFLYLASHYEKLKGSPEDNEQKQLFVEQHKHYLDEIIEQISEFSKRVILADANLDKVLSAYNKHRDKPIREQAENIIHLFTLTNLGAPAAFKYFDTTIDRKQYRSTKEVLDATLIHQSITGLYETRIDLSQLGGDEGADKRTADGSEFESPKKKRKV

SEQ ID NO: 351 - protein, 1588 aa, synthetic construct
  REGION 1..1588: note = 11. monoABE8.1_bpNLS +Y147T_Q154R polypeptide sequence
MSEVEFSHEYWMRHALTLAKRARDEREVPVGAVLVLNNRVIGEGWNRAIGLHDPTAHAEIMALRQGGLVMQNYRLIDATLYVTFEPCVMCAGAMIHSRIGRVVFGVRNAKTGAAGSLMDVLHYPGMNHRVEITEGILADECAALLCTFFRMPRRVFNAQKKAQSSTDSGGSSGGSSGSETPGTSESATPESSGGSSGGSDKKYSIGLAIGTNSVGWAVITDEYKVPSKKFKVLGNTDRHSIKKNLIGALLFDSGETAEATRLKRTARRRYTRRKNRICYLQEIFSNEMAKVDDSFFHRLEESFLVEEDKKHERHPIFGNIVDEVAYHEKYPTIYHLRKKLVDSTDKADLRLIYLALAHMIKFRGHFLIEGDLNPDNSDVDKLFIQLVQTYNQLFEENPINASGVDAKAILSARLSKSRRLENLIAQLPGEKKNGLFGNLIALSLGLTPNFKSNFDLAEDAKLQLSKDTYDDDLDNLLAQIGDQYADLFLAAKNLSDAILLSDILRVNTEITKAPLSASMIKRYDEHHQDLTLLKALVRQQLPEKYKEIFFDQSKNGYAGYIDGGASQEEFYKFIKPILEKMDGTEELLVKLNREDLLRKQRTFDNGSIPHQIHLGELHAILRRQEDFYPFLKDNREKIEKILTFRIPYYVGPLARGNSRFAWMTRKSEETITPWNFEEVVDKGASAQSFIERMTNFDKNLPNEKVLPKHSLLYEYFTVYNELTKVKYVTEGMRKPAFLSGEQKKAIVDLLFKTNRKVTVKQLKEDYFKKIECFDSVEISGVEDRFNASLGTYHDLLKIIKDKDFLDNEENEDILEDIVLTLTLFEDREMIEERLKTYAHLFDDKVMKQLKRRRYTGWGRLSRKLINGIRDKQSGKTILDFLKSDGFANRNFMQLIHDDSLTFKEDIQKAQVSGQGDSLHEHIANLAGSPAIKKGILQTVKVVDELVKVMGRHKPENIVIEMARENQTTQKGQKNSRERMKRIEEGIKELGSQILKEHPVENTQLQNEKLYLYYLQNGRDMYVDQELDINRLSDYDVDHIVPQSFLKDDSIDNKVLTRSDKNRGKSDNVPSEEVVKKMKNYWRQLLNAKLITQRKFDNLTKAERGGLSELDKAGFIKRQLVETRQITKHVAQILDSRMNTKYDENDKLIREVKVITLKSKLVSDFRKDFQFYKVREINNYHHAHDAYLNAVVGTALIKKYPKLESEFVYGDYKVYDVRKMIAKSEQEIGKATAKYFFYSNIMNFFKTEITLANGEIRKRPLIETNGETGEIVWDKGRDFATVRKVLSMPQVNIVKKTEVQTGGFSKESILPKRNSDKLIARKKDWDPKKYGGFVSPTVAYSVLVVAKVEKGKSKKLKSVKELLGITIMERSSFEKNPIDFLEAKGYKEVKKDLIIKLPKYSLFELENGRKRMLASARELQKGNELALPSKYVNFLYLASHYEKLKGSPEDNEQKQLFVEQHKHYLDEIIEQISEFSKRVILADANLDKVLSAYNKHRDKPIREQAENIIHLFTLTNLGAPAAFKYFDTTIDRKQYRSTKEVLDATLIHQSITGLYETRIDLSQLGGDEGADKRTADGSEFESPKKKRKV

SEQ ID NO: 352 - protein, 1588 aa, synthetic construct
  REGION 1..1588: note = 12. monoABE8.1_bpNLS +Y147T_Q154S polypeptide sequence
MSEVEFSHEYWMRHALTLAKRARDEREVPVGAVLVLNNRVIGEGWNRAIGLHDPTAHAEIMALRQGGLVMQNYRLIDATLYVTFEPCVMCAGAMIHSRIGRVVFGVRNAKTGAAGSLMDVLHYPGMNHRVEITEGILADECAALLCTFFRMPRSVFNAQKKAQSSTDSGGSSGGSSGSETPGTSESATPESSGGSSGGSDKKYSIGLAIGTNSVGWAVITDEYKVPSKKFKVLGNTDRHSIKKNLIGALLFDSGETAEATRLKRTARRRYTRRKNRICYLQEIFSNEMAKVDDSFFHRLEESFLVEEDKKHERHPIFGNIVDEVAYHEKYPTIYHLRKKLVDSTDKADLRLIYLALAHMIKFRGHFLIEGDLNPDNSDVDKLFIQLVQTYNQLFEENPINASGVDAKAILSARLSKSRRLENLIAQLPGEKKNGLFGNLIALSLGLTPNFKSNFDLAEDAKLQLSKDTYDDDLDNLLAQIGDQYADLFLAAKNLSDAILLSDILRVNTEITKAPLSASMIKRYDEHHQDLTLLKALVRQQLPEKYKEIFFDQSKNGYAGYIDGGASQEEFYKFIKPILEKMDGTEELLVKLNREDLLRKQRTFDNGSIPHQIHLGELHAILRRQEDFYPFLKDNREKIEKILTFRIPYYVGPLARGNSRFAWMTRKSEETITPWNFEEVVDKGASAQSFIERMTNFDKNLPNEKVLPKHSLLYEYFTVYNELTKVKYVTEGMRKPAFLSGEQKKAIVDLLFKTNRKVTVKQLKEDYFKKIECFDSVEISGVEDRFNASLGTYHDLLKIIKDKDFLDNEENEDILEDIVLTLTLFEDREMIEERLKTYAHLFDDKVMKQLKRRRYTGWGRLSRKLINGIRDKQSGKTILDFLKSDGFANRNFMQLIHDDSLTFKEDIQKAQVSGQGDSLHEHIANLAGSPAIKKGILQTVKVVDELVKVMGRHKPENIVIEMARENQTTQKGQKNSRERMKRIEEGIKELGSQILKEHPVENTQLQNEKLYLYYLQNGRDMYVDQELDINRLSDYDVDHIVPQSFLKDDSIDNKVLTRSDKNRGKSDNVPSEEVVKKMKNYWRQLLNAKLITQRKFDNLTKAERGGLSELDKAGFIKRQLVETRQITKHVAQILDSRMNTKYDENDKLIREVKVITLKSKLVSDFRKDFQFYKVREINNYHHAHDAYLNAVVGTALIKKYPKLESEFVYGDYKVYDVRKMIAKSEQEIGKATAKYFFYSNIMNFFKTEITLANGEIRKRPLIETNGETGEIVWDKGRDFATVRKVLSMPQVNIVKKTEVQTGGFSKESILPKRNSDKLIARKKDWDPKKYGGFVSPTVAYSVLVVAKVEKGKSKKLKSVKELLGITIMERSSFEKNPIDFLEAKGYKEVKKDLIIKLPKYSLFELENGRKRMLASARELQKGNELALPSKYVNFLYLASHYEKLKGSPEDNEQKQLFVEQHKHYLDEIIEQISEFSKRVILADANLDKVLSAYNKHRDKPIREQAENIIHLFTLTNLGAPAAFKYFDTTIDRKQYRSTKEVLDATLIHQSITGLYETRIDLSQLGGDEGADKRTADGSEFESPKKKRKV

SEQ ID NO: 353 - protein, 1588 aa, synthetic construct
  REGION 1..1588: note = 13. monoABE8.1_bpNLS +H123Y123H_Y147R_Q154R_I76Y polypeptide sequence
MSEVEFSHEYWMRHALTLAKRARDEREVPVGAVLVLNNRVIGEGWNRAIGLHDPTAHAEIMALRQGGLVMQNYRLYDATLYVTFEPCVMCAGAMIHSRIGRVVFGVRNAKTGAAGSLMDVLHHPGMNHRVEITEGILADECAALLCRFFRMPRRVFNAQKKAQSSTDSGGSSGGSSGSETPGTSESATPESSGGSSGGSDKKYSIGLAIGTNSVGWAVITDEYKVPSKKFKVLGNTDRHSIKKNLIGALLFDSGETAEATRLKRTARRRYTRRKNRICYLQEIFSNEMAKVDDSFFHRLEESFLVEEDKKHERHPIFGNIVDEVAYHEKYPTIYHLRKKLVDSTDKADLRLIYLALAHMIKFRGHFLIEGDLNPDNSDVDKLFIQLVQTYNQLFEENPINASGVDAKAILSARLSKSRRLENLIAQLPGEKKNGLFGNLIALSLGLTPNFKSNFDLAEDAKLQLSKDTYDDDLDNLLAQIGDQYADLFLAAKNLSDAILLSDILRVNTEITKAPLSASMIKRYDEHHQDLTLLKALVRQQLPEKYKEIFFDQSKNGYAGYIDGGASQEEFYKFIKPILEKMDGTEELLVKLNREDLLRKQRTFDNGSIPHQIHLGELHAILRRQEDFYPFLKDNREKIEKILTFRIPYYVGPLARGNSRFAWMTRKSEETITPWNFEEVVDKGASAQSFIERMTNFDKNLPNEKVLPKHSLLYEYFTVYNELTKVKYVTEGMRKPAFLSGEQKKAIVDLLFKTNRKVTVKQLKEDYFKKIECFDSVEISGVEDRFNASLGTYHDLLKIIKDKDFLDNEENEDILEDIVLTLTLFEDREMIEERLKTYAHLFDDKVMKQLKRRRYTGWGRLSRKLINGIRDKQSGKTILDFLKSDGFANRNFMQLIHDDSLTFKEDIQKAQVSGQGDSLHEHIANLAGSPAIKKGILQTVKVVDELVKVMGRHKPENIVIEMARENQTTQKGQKNSRERMKRIEEGIKELGSQILKEHPVENTQLQNEKLYLYYLQNGRDMYVDQELDINRLSDYDVDHIVPQSFLKDDSIDNKVLTRSDKNRGKSDNVPSEEVVKKMKNYWRQLLNAKLITQRKFDNLTKAERGGLSELDKAGFIKRQLVETRQITKHVAQILDSRMNTKYDENDKLIREVKVITLKSKLVSDFRKDFQFYKVREINNYHHAHDAYLNAVVGTALIKKYPKLESEFVYGDYKVYDVRKMIAKSEQEIGKATAKYFFYSNIMNFFKTEITLANGEIRKRPLIETNGETGEIVWDKGRDFATVRKVLSMPQVNIVKKTEVQTGGFSKESILPKRNSDKLIARKKDWDPKKYGGFVSPTVAYSVLVVAKVEKGKSKKLKSVKELLGITIMERSSFEKNPIDFLEAKGYKEVKKDLIIKLPKYSLFELENGRKRMLASARELQKGNELALPSKYVNFLYLASHYEKLKGSPEDNEQKQLFVEQHKHYLDEIIEQISEFSKRVILADANLDKVLSAYNKHRDKPIREQAENIIHLFTLTNLGAPAAFKYFDTTIDRKQYRSTKEVLDATLIHQSITGLYETRIDLSQLGGDEGADKRTADGSEFESPKKKRKV

SEQ ID NO: 354 - protein, 1588 aa, synthetic construct
  REGION 1..1588: note = 14. monoABE8.1_bpNLS + V82S +Q154R polypeptide sequence
MSEVEFSHEYWMRHALTLAKRARDEREVPVGAVLVLNNRVIGEGWNRAIGLHDPTAHAEIMALRQGGLVMQNYRLIDATLYSTFEPCVMCAGAMIHSRIGRVVFGVRNAKTGAAGSLMDVLHYPGMNHRVEITEGILADECAALLCYFFRMPRRVFNAQKKAQSSTDSGGSSGGSSGSETPGTSESATPESSGGSSGGSDKKYSIGLAIGTNSVGWAVITDEYKVPSKKFKVLGNTDRHSIKKNLIGALLFDSGETAEATRLKRTARRRYTRRKNRICYLQEIFSNEMAKVDDSFFHRLEESFLVEEDKKHERHPIFGNIVDEVAYHEKYPTIYHLRKKLVDSTDKADLRLIYLALAHMIKFRGHFLIEGDLNPDNSDVDKLFIQLVQTYNQLFEENPINASGVDAKAILSARLSKSRRLENLIAQLPGEKKNGLFGNLIALSLGLTPNFKSNFDLAEDAKLQLSKDTYDDDLDNLLAQIGDQYADLFLAAKNLSDAILLSDILRVNTEITKAPLSASMIKRYDEHHQDLTLLKALVRQQLPEKYKEIFFDQSKNGYAGYIDGGASQEEFYKFIKPILEKMDGTEELLVKLNREDLLRKQRTFDNGSIPHQIHLGELHAILRRQEDFYPFLKDNREKIEKILTFRIPYYVGPLARGNSRFAWMTRKSEETITPWNFEEVVDKGASAQSFIERMTNFDKNLPNEKVLPKHSLLYEYFTVYNELTKVKYVTEGMRKPAFLSGEQKKAIVDLLFKTNRKVTVKQLKEDYFKKIECFDSVEISGVEDRFNASLGTYHDLLKIIKDKDFLDNEENEDILEDIVLTLTLFEDREMIEERLKTYAHLFDDKVMKQLKRRRYTGWGRLSRKLINGIRDKQSGKTILDFLKSDGFANRNFMQLIHDDSLTFKEDIQKAQVSGQGDSLHEHIANLAGSPAIKKGILQTVKVVDELVKVMGRHKPENIVIEMARENQTTQKGQKNSRERMKRIEEGIKELGSQILKEHPVENTQLQNEKLYLYYLQNGRDMYVDQELDINRLSDYDVDHIVPQSFLKDDSIDNKVLTRSDKNRGKSDNVPSEEVVKKMKNYWRQLLNAKLITQRKFDNLTKAERGGLSELDKAGFIKRQLVETRQITKHVAQILDSRMNTKYDENDKLIREVKVITLKSKLVSDFRKDFQFYKVREINNYHHAHDAYLNAVVGTALIKKYPKLESEFVYGDYKVYDVRKMIAKSEQEIGKATAKYFFYSNIMNFFKTEITLANGEIRKRPLIETNGETGEIVWDKGRDFATVRKVLSMPQVNIVKKTEVQTGGFSKESILPKRNSDKLIARKKDWDPKKYGGFVSPTVAYSVLVVAKVEKGKSKKLKSVKELLGITIMERSSFEKNPIDFLEAKGYKEVKKDLIIKLPKYSLFELENGRKRMLASARELQKGNELALPSKYVNFLYLASHYEKLKGSPEDNEQKQLFVEQHKHYLDEIIEQISEFSKRVILADANLDKVLSAYNKHRDKPIREQAENIIHLFTLTNLGAPAAFKYFDTTIDRKQYRSTKEVLDATLIHQSITGLYETRIDLSQLGGDEGADKRTADGSEFESPKKKRKV

SEQ ID NO: 355 - protein, 4 aa, synthetic construct
  REGION 1..4: note = synthetic peptide sequence
SGGS

SEQ ID NO: 356 - protein, 24 aa, synthetic construct
  REGION 1..24: note = synthetic peptide sequence
SGGSSGSETPGTSESATPESSGGS

SEQ ID NO: 357 - protein, 32 aa, synthetic construct
  REGION 1..32: note = synthetic polypeptide sequence
SGGSSGGSSGSETPGTSESATPESSGGSSGGS

SEQ ID NO: 358 - protein, 104 aa, synthetic construct
  REGION 1..104: note = synthetic polypeptide sequence
GGSGGSPGSPAGSPTSTEEGTSESATPESGPGTSTEPSEGSAPGSPAGSPTSTEEGTSTEPSEGSAPGTSTEPSEGSAPGTSESATPESGPGSEPATSGGSGGS

SEQ ID NO: 359 - protein, 24 aa, synthetic construct
  REGION 1..24: note = synthetic peptide sequence
SGGSSGGSSGSETPGTSESATPES

SEQ ID NO: 360 - protein, 40 aa, synthetic construct
  REGION 1..40: note = synthetic polypeptide sequence
SGGSSGGSSGSETPGTSESATPESSGGSSGGSSGGSSGGS

SEQ ID NO: 361 - protein, 64 aa, synthetic construct
  REGION 1..64: note = synthetic polypeptide sequence
SGGSSGGSSGSETPGTSESATPESSGGSSGGSSGGSSGGSSGSETPGTSESATPESSGGSSGGS

SEQ ID NO: 362 - protein, 92 aa, synthetic construct
  REGION 1..92: note = synthetic polypeptide sequence
PGSPAGSPTSTEEGTSESATPESGPGTSTEPSEGSAPGSPAGSPTSTEEGTSTEPSEGSAPGTSTEPSEGSAPGTSESATPESGPGSEPATS

SEQ ID NO: 363 - protein, 5 aa, synthetic construct
  REGION 1..5: note = synthetic peptide sequence
PAPAP

SEQ ID NO: 364 - protein, 6 aa, synthetic construct
  REGION 1..6: note = synthetic peptide sequence
PAPAPA

SEQ ID NO: 365 - protein, 7 aa, synthetic construct
  REGION 1..7: note = synthetic peptide sequence
PAPAPAP

SEQ ID NO: 366 - protein, 8 aa, synthetic construct
  REGION 1..8: note = synthetic peptide sequence
PAPAPAPA

SEQ ID NO: 367 - protein, 9 aa, synthetic construct
  REGION 1..9: note = synthetic peptide sequence
PAPAPAPAP

SEQ ID NO: 368 - protein, 15 aa, synthetic construct
  REGION 1..15: note = synthetic peptide sequence
PAPAPAPAPAPAPAP

SEQ ID NO: 369 - protein, 21 aa, synthetic construct
  REGION 1..21: note = synthetic peptide sequence
PAPAPAPAPAPAPAPAPAPAP

SEQ ID NO: 370 - DNA, 306 bp, synthetic construct
  misc_feature 1..306: note = DnaE Intein-N polynucleotide sequence
  source 1..306: mol_type = other DNA
tgcctgtcatacgaaaccgagatactgacagtagaatatggccttctgccaatcgggaagattgtggagaaacggatagaatgcacagtttactctgtcgataacaatggtaacatttatactcagccagttgcccagtggcacgaccggggagagcaggaagtattcgaatactgtctggaggatggaagtctcattagggccactaaggaccacaaatttatgacagtcgatggccagatgctgcctatagacgaaatctttgagcgagagttggacctcatgcgagttgacaaccttcctaat

SEQ ID NO: 371 - protein, 102 aa, synthetic construct
  REGION 1..102: note = DnaE Intein-N polypeptide sequence
CLSYETEILTVEYGLLPIGKIVEKRIECTVYSVDNNGNIYTQPVAQWHDRGEQEVFEYCLEDGSLIRATKDHKFMTVDGQMLPIDEIFERELDLMRVDNLPN

SEQ ID NO: 372 - DNA, 108 bp, synthetic construct
  misc_feature 1..108: note = DnaE Intein-C polynucleotide sequence
  source 1..108: mol_type = other DNA
atgatcaagatagctacaaggaagtatcttggcaaacaaaacgtttatgatattggagtcgaaagagatcacaactttgctctgaagaacggattcatagcttctaat

SEQ ID NO: 373 - protein, 36 aa, synthetic construct
  REGION 1..36: note = DnaE Intein-C polypeptide sequence
MIKIATRKYLGKQNVYDIGVERDHNFALKNGFIASN

SEQ ID NO: 374 - DNA, 303 bp, synthetic construct
  misc_feature 1..303: note = Cfa-N polynucleotide sequence
  source 1..303: mol_type = other DNA
tgcctgtcttatgataccgagatacttaccgttgaatatggcttcttgcctattggaaagattgtcgaagagagaattgaatgcacagtatatactgtagacaagaatggtttcgtttacacacagcccattgctcaatggcacaatcgcggcgaacaagaagtatttgagtactgtctcgaggatggaagcatcatacgagcaactaaagatcataaattcatgaccactgacgggcagatgttgccaatagatgagatattcgagcggggcttggatctcaaacaagtggatggattgcca

SEQ ID NO: 375 - protein, 101 aa, synthetic construct
  REGION 1..101: note = Cfa-N polypeptide sequence
CLSYDTEILTVEYGFLPIGKIVEERIECTVYTVDKNGFVYTQPIAQWHNRGEQEVFEYCLEDGSIIRATKDHKFMTTDGQMLPIDEIFERGLDLKQVDGLP

SEQ ID NO: 376 - DNA, 159 bp, synthetic construct
  misc_feature 1..159: note = Cfa-C polynucleotide sequence
  source 1..159: mol_type = other DNA
atgaagaggactgccgatggatcagagtttgaatctcccaagaagaagaggaaagtaaagataatatctcgaaaaagtcttggtacccaaaatgtctatgatattggagtggagaaagatcacaacttccttctcaagaacggtctcgtagccagcaac

SEQ ID NO: 377 - protein, 53 aa, synthetic construct
  REGION 1..53: note = Cfa-C polypeptide sequence
MKRTADGSEFESPKKKRKVKIISRKSLGTQNVYDIGVEKDHNFLLKNGLVASN

SEQ ID NO: 378 - protein, 1081 aa, Neisseria meningitidis
  REGION 1..1081: note = MISC_FEATURE - Nme3Cas9; WP_002217928.1 type II CRISPR RNA-guided endonuclease Cas9 [Neisseria meningitidis]
  REGION 1..1081: note = MISC_FEATURE - NCBI Reference: WP_002217928.1; type II CRISPR RNA-guided endonuclease Cas9; Nme3Cas9 polypeptide sequence
MAAFKPNPINYILGLDIGIASVGWAMVEIDEEENPIRLIDLGVRVFERAEVPKTGDSLAMARRLARSVRRLTRRRAHRLLRARRLLKREGVLQAADFDENGLIKSLPNTPWQLRAAALDRKLTPLEWSAVLLHLIKHRGYLSQRKNEGETADKELGALLKGVADNAHALQTGDFRTPAELALNKFEKECGHIRNQRGDYSHTFSRKDLQAELNLLFEKQKEFGNPHVSGGLKEGIETLLMTQRPALSGDAVQKMLGHCTFEPAEPKAAKNTYTAERFIWLTKLNNLRILEQGSERPLTDTERATLMDEPYRKSKLTYAQARKLLSLEDTAFFKGLRYGKDNAEASTLMEMKAYHTISRALEKEGLKDKKSPLNLSPELQDEIGTAFSLFKTDEDITGRLKDRIQPEILEALLKHISFDKFVQISLKALRRIVPLMEQGKRYDEACAEIYGDHYGKKNTEEKIYLPPIPADEIRNPVVLRALSQARKVINGVVRRYGSPARIHIETAREVGKSFKDRKEIEKRQEENRKDREKAAAKFREYFPNFVGEPKSKDILKLRLYEQQHGKCLYSGKEINLGRLNEKGYVEIDHALPFSRTWDDSFNNKVLVLGSENQNKGNQTPYEYFNGKDNSREWQEFKARVETSRFPRSKKQRILLQKFDEDGFKERNLNDTRYVNRFLCQFVADRMRLTGKGKKRVFASNGQITNLLRGFWGLRKVRAENDRHHALDAVVVACSTVAMQQKITRFVRYKEMNAFDGKTIDKETGEVLHQKTHFPQPWEFFAQEVMIRVFGKPDGKPEFEEADTPEKLRTLLAEKLSSRPEAVHEYVTPLFVSRAPNRKMSGQGHMETVKSAKRLDEGVSVLRVPLTQLKLKDLEKMVNREREPKLYEALKARLEAHKDDPAKAFAEPFYKYDKAGNRTQQVKAVRVEQVQKTGVWVRNHNGIADNATMVRVDVFEKGDKYYLVPIYSWQVAKGILPDRAVVAYADEEDWTVIDESFRFKFVLYSNDLIKVQLKKDSFLGYFSGLDRATGAISLREHDLEKSKGKDGMHRIGVKTALSFQKYQIDEMGKEIRPCRLKKRPPVR

SEQ ID NO: 379 - RNA, 66 nt, synthetic construct
  misc_feature 1..66: note = Telomerase Ku Binding Motif oligonucleotide sequence
  source 1..66: mol_type = other RNA
ttcttgtcgtacttatagatcgctacgttatttcaattttgaaaatctgagtcctgggagtgcgga

SEQ ID NO: 380 - protein, 1094 aa, synthetic construct
  REGION 1..1094: note = Telomerase Ku Heterodimer polypeptide sequence
MSGWESYYKTEGDEEAEEEQEENLEASGDYKYSGRDSLIFLVDASKAMFESQSEDELTPFDMSIQCIQSVYISKIISSDRDLLAVVFYGTEKDKNSVNFKNIYVLQELDNPGAKRILELDQFKGQQGQKRFQDMMGHGSDYSLSEVLWVCANLFSDVQFKMSHKRIMLFTNEDNPHGNDSAKASRARTKAGDLRDTGIFLDLMHLKKPGGFDISLFYRDIISIAEDEDLRVHFEESSKLEDLLRKVRAKETRKRALSRLKLKLNKDIVISVGIYNLVQKALKPPPIKLYRETNEPVKTKTRTFNTSTGGLLLPSDTKRSQIYGSRQIILEKEETEELKRFDDPGLMLMGFKPLVLLKKHHYLRPSLFVYPEESLVIGSSTLFSALLIKCLEKEVAALCRYTPRRNIPPYFVALVPQEEELDDQKIQVTPPGFQLVFLPFADDKRKMPFTEKIMATPEQVGKMKAIVEKLRFTYRSDSFENPVLQQHFRNLEALALDLMEPEQAVDLTLPKVEAMNKRLGSLVDEFKELVYPPDYNPEGKVTKRKHDNEGSGSKRPKVEYSEEELKTHISKGTLGKFTVPMLKEACRAYGLKSGLKKQELLEALTKHFQDMVRSGNKAAVVLCMDVGFTMSNSIPGIESPFEQAKKVITMFVQRQVFAENKDEIALVLFGTDGTDNPLSGGDQYQNITVHRHLMLPDFDLLEDIESKIQPGSQQADFLDALIVSMDVIQHETIGKKFEKRHIEIFTDLSSRFSKSQLDIIIHSLKKCDISERHSIHWPCRLTIGSNLSIRIAAYKSILQERVKKTWTVVDAKTLKKEDIQKETVYCLNDDDETEVLKEDIIQGFRYGSDIVPFSKVDEEQMKYKSEGKCFSVLGFCKSSQVQRRFFMGNQVLKVFAARDDEAAAVALSSLIHALDDLDMVAIVRYAYDKRANPQVGVAFPHIKHNYECLVYVQLPFMEDLRQYMFSSLKNSKKYAPTEAQLNAVDALIDSMSLAKKDEKTDTLEDLFPTTKIPNPRFQRLFQCLLHRALHPREPLPPIQQHIWNMLNPPAEVTTKSQIPLSKIKTLFPLIEAKKKDQVTAQEIFQDNHEDGPTAK

SEQ ID NO: 381 - RNA, 10 nt, synthetic construct
  misc_feature 1..10: note = Telomerase Sm7 consensus site(single stranded) oligonucleotide sequence
  source 1..10: mol_type = other RNA
aatttttgga

SEQ ID NO: 382 - protein, 83 aa, synthetic construct
  REGION 1..83: note = MS2 coat protein polypeptide sequence
GSVIDVSSQRVNVQRPLDALGNSLNSPVIIKLKGDREFRGVLKSFDLHMNLVLNDAEELEDGEVTRRLGTVLIRGDNIVYISP

SEQ ID NO: 383 - RNA, 26 nt, synthetic construct
  misc_feature 1..26: note = PP7 phage operator stem loop oligonucleotide sequence
  source 1..26: mol_type = other RNA
ataaggagtttatatggaaaccctta

SEQ ID NO: 384 - protein, 128 aa, synthetic construct
  REGION 1..128: note = PP7 coat protein (PCP)polypeptide sequence
MSKTIVLSVGEATRTLTEIQSTADRQIFEEKVGPLVGRLRLTASLRQNGAKTAYRVNLKLDQADVVDCSTSVCGELPKVRYTQVWSHDVTIVANSTEASRKSLYDLTKSLVATSQVEDLVVNLVPLGR

SEQ ID NO: 385 - RNA, 19 nt, synthetic construct
  misc_feature 1..19: note = SfMu Com stem loop oligonucleotide sequence
  source 1..19: mol_type = other RNA
ctgaatgcctgcgagcatc

SEQ ID NO: 386 - protein, 62 aa, synthetic construct
  REGION 1..62: note = SfMu Com binding protein polypeptide sequence
MKSIRCKNCNKLLFKADSFDHIEIRCPRCKRHIIMLNACEHPTEKHCGKREKITHSDETVRY

SEQ ID NO: 387 - protein, 47 aa, synthetic construct
  REGION 1..47: note = leucine zipper polypeptide sequence
LEIRAAFLRQRNTALRTEVAELEQEVQRLENEVSQYETRYGPLGGGK

SEQ ID NO: 388 - protein, 47 aa, synthetic construct
  REGION 1..47: note = leucine zipper polypeptide sequence
LEIEAAFLERENTALETRVAELRQRVQRLRNRVSQYRTRYGPLGGGK

SEQ ID NO: 389 - DNA, 303 bp, synthetic construct
  source 1..303: mol_type = other DNA
tgcctgagctacgataccgagatcctgaccgtggaatacggcttcctgcctatcggcaagatcgtcgaggaacggatcgagtgcacagtgtacaccgtggataagaatggcttcgtgtacacccagcctatcgctcagtggcacaacagaggcgagcaagaggtgttcgagtactgcctggaagatggcagcatcatccgggccaccaaggaccacaagtttatgaccaccgacggccagatgctgcccatcgacgagatctttgagagaggcctggacctgaaacaggtggacggactgcct

SEQ ID NO: 390 - protein, 101 aa, synthetic construct; identical to SEQ ID NO: 375

SEQ ID NO: 391 - DNA, 264 bp, synthetic construct
  source 1..264: mol_type = other DNA
tgtctggacctcaagacccaagtgcagacacctcagggcatgaaagagattagcaatatccaggtgggcgacctggtcctgagcaacaccggctacaacgaggtgctgaacgtgttccctaagtccaagaagaaatcttataagatcaccctggaagatggcaaggaaatcatctgcagcgaggaacacctgttccccacccagaccggcgagatgaacatcagcggcggactgaaggagggcatgtgcctgtacgtgaaggag

SEQ ID NO: 392 - protein, 88 aa, synthetic construct
CLDLKTQVQTPQGMKEISNIQVGDLVLSNTGYNEVLNVFPKSKKKSYKITLEDGKEIICSEEHLFPTQTGEMNISGGLKEGMCLYVKE

SEQ ID NO: 393 - DNA, 267 bp, synthetic construct
  source 1..267: mol_type = other DNA
tgcctgagcctggacaccatggtggtgacaaacggcaaggccatcgagatcagagatgtgaaggtgggagattggctggaaagcgaatgtggcccagtgcaggttacagaggtgctgcctatcatcaagcagcctgtctttgagattgtgctgaaaagcggaaaaaagatccgggtgtccgctaatcacaagttccccaccaaggacggcctcaagaccatcaacagcggcctgaaggtgggcgacttcctgagaagcagagccaag

SEQ ID NO: 394 - protein, 89 aa, synthetic construct
CLSLDTMVVTNGKAIEIRDVKVGDWLESECGPVQVTEVLPIIKQPVFEIVLKSGKKIRVSANHKFPTKDGLKTINSGLKVGDFLRSRAK

SEQ ID NO: 395 - DNA, 303 bp, synthetic construct
  source 1..303: mol_type = other DNA
tgttttgtgcctggcaccctggtgaacacagagaatggcctgaagaaaatcgaggaaatcaaggtgggcgacaaggtgttcagccatacaggcaagctgcaggaggtggtggacaccctgatcttcgaccgggacgaggaaatcatctctatcaacggcattgattgcaccaagaaccacgagttctacgtgatcgataaggaaaacgctaatagagtgaacgaggacaacatccacctcttcgccagatgggtccacgccgaggaactggatatgaaaaagcacctgctgatcgagctggaa

SEQ ID NO: 396 - protein, 101 aa, synthetic construct
CFVPGTLVNTENGLKKIEEIKVGDKVFSHTGKLQEVVDTLIFDRDEEIISINGIDCTKNHEFYVIDKENANRVNEDNIHLFARWVHAEELDMKKHLLIELE

SEQ ID NO: 397 - DNA, 315 bp, synthetic construct
  source 1..315: mol_type = other DNA
tgcctggtgggctctagcgagattatcacaagaaactacggcaagaccaccatcaaggaagtggtcgagatcttcgacaacgacaagaatatccaggtgctggccttcaacacccacaccgataatatcgagtgggcccctatcaaggccgctcagctgaccagacctaacgccgagctggttgaactggaaatcgacaccctgcacggcgtgaaaacaatccggtgcacccctgaccaccccgtgtacaccaagaacagaggctacgtgcgggccgacgagctgacagatgatgacgagctcgtggtggctatc

SEQ ID NO: 398 - protein, 105 aa, synthetic construct
CLVGSSEIITRNYGKTTIKEVVEIFDNDKNIQVLAFNTHTDNIEWAPIKAAQLTRPNAELVELEIDTLHGVKTIRCTPDHPVYTKNRGYVRADELTDDDELVVAI

SEQ ID NO: 399 - DNA, 306 bp, synthetic construct
  source 1..306: mol_type = other DNA
tgcctgagctacgagacagagatcctgaccgtggaatatggcctgctgccaatcggaaagatcgtggaaaagcggatcgagtgcaccgtctacagcgtggacaacaacggaaatatctatacacagcctgtggcccaatggcacgaccggggcgaacaggaggtgtttgagtactgcctggaagatggttctctgattagagccaccaaggaccacaagttcatgaccgtcgacggccagatgctgcccatcgacgaaatcttcgagcgggaactcgacctgatgagagtggataacctgcccaat

SEQ ID NO: 400 - protein, 102 aa, synthetic construct; identical to SEQ ID NO: 371

SEQ ID NO: 401 - protein, 101 aa, synthetic construct; identical to SEQ ID NO: 375

SEQ ID NO: 402 - protein, 102 aa, synthetic construct; identical to SEQ ID NO: 371

SEQ ID NO: 403 - DNA, 279 bp, synthetic construct
  source 1..279: mol_type = other DNA
acaagaagcggatactgtctggacctcaagacccaagtgcagacacctcagggcatgaaagagattagcaatatccaggtgggcgacctggtcctgagcaacaccggctacaacgaggtgctgaacgtgttccctaagtccaagaagaaatcttataagatcaccctggaagatggcaaggaaatcatctgcagcgaggaacacctgttccccacccagaccggcgagatgaacatcagcggcggactgaaggagggcatgtgcctgtacgtgaaggag

SEQ ID NO: 404 - protein, 93 aa, synthetic construct
TRSGYCLDLKTQVQTPQGMKEISNIQVGDLVLSNTGYNEVLNVFPKSKKKSYKITLEDGKEIICSEEHLFPTQTGEMNISGGLKEGMCLYVKE

SEQ ID NO: 405 - DNA, 282 bp, synthetic construct
  source 1..282: mol_type = other DNA
tctcagctgaaccggtgcctgagcctggacaccatggtggtgacaaacggcaaggccatcgagatcagagatgtgaaggtgggagattggctggaaagcgaatgtggcccagtgcaggttacagaggtgctgcctatcatcaagcagcctgtctttgagattgtgctgaaaagcggaaaaaagatccgggtgtccgctaatcacaagttccccaccaaggacggcctcaagaccatcaacagcggcctgaaggtgggcgacttcctgagaagcagagccaag

SEQ ID NO: 406 - protein, 94 aa, synthetic construct
SQLNRCLSLDTMVVTNGKAIEIRDVKVGDWLESECGPVQVTEVLPIIKQPVFEIVLKSGKKIRVSANHKFPTKDGLKTINSGLKVGDFLRSRAK

SEQ ID NO: 407 - DNA, 318 bp, synthetic construct
  source 1..318: mol_type = other DNA
ggcatcggcggaggatgttttgtgcctggcaccctggtgaacacagagaatggcctgaagaaaatcgaggaaatcaaggtgggcgacaaggtgttcagccatacaggcaagctgcaggaggtggtggacaccctgatcttcgaccgggacgaggaaatcatctctatcaacggcattgattgcaccaagaaccacgagttctacgtgatcgataaggaaaacgctaatagagtgaacgaggacaacatccacctcttcgccagatgggtccacgccgaggaactggatatgaaaaagcacctgctgatcgagctggaa

SEQ ID NO: 408 - protein, 106 aa, synthetic construct
GIGGGCFVPGTLVNTENGLKKIEEIKVGDKVFSHTGKLQEVVDTLIFDRDEEIISINGIDCTKNHEFYVIDKENANRVNEDNIHLFARWVHAEELDMKKHLLIELE

SEQ ID NO: 409 - DNA, 330 bp, synthetic construct
  source 1..330: mol_type = other DNA
ggaacaaacccatgttgcctggtgggctctagcgagattatcacaagaaactacggcaagaccaccatcaaggaagtggtcgagatcttcgacaacgacaagaatatccaggtgctggccttcaacacccacaccgataatatcgagtgggcccctatcaaggccgctcagctgaccagacctaacgccgagctggttgaactggaaatcgacaccctgcacggcgtgaaaacaatccggtgcacccctgaccaccccgtgtacaccaagaacagaggctacgtgcgggccgacgagctgacagatgatgacgagctcgtggtggctatc

SEQ ID NO: 410 - protein, 110 aa, synthetic construct
GTNPCCLVGSSEIITRNYGKTTIKEVVEIFDNDKNIQVLAFNTHTDNIEWAPIKAAQLTRPNAELVELEIDTLHGVKTIRCTPDHPVYTKNRGYVRADELTDDDELVVAI

SEQ ID NO: 411 - DNA, 105 bp, synthetic construct
  source 1..105: mol_type = other DNA
gtcaagatcatcagcagaaagagcctgggcacccagaacgtgtacgatatcggagtgggcgagccccacaactttctgctcaagaatggcctggtggccagcaac

SEQ ID NO: 412 - protein, 35 aa, synthetic construct
VKIISRKSLGTQNVYDIGVGEPHNFLLKNGLVASN

SEQ ID NO: 413 - DNA, 114 bp, synthetic construct
  source 1..114: mol_type = other DNA
atgatgctgaaaaagatcctgaagatcgaggaactggatgagagagagctgatcgacatcgaagtgtctggcaatcacctgttctacgccaacgacatcctgacccacaacagc

SEQ ID NO: 414 - protein, 38 aa, synthetic construct
MMLKKILKIEELDERELIDIEVSGNHLFYANDILTHNS

SEQ ID NO: 415 - DNA, 138 bp, synthetic construct
  source 1..138: mol_type = other DNA
atgtgcgaaatcttcgagaacgagattgattgggacgaaatcgcctctatcgagtacgtgggcgtggaagagacaatcgacatcaacgtgaccaacgacagactgtttttcgccaatggcatcctgacccacaacagc

SEQ ID NO: 416 - protein, 46 aa, synthetic construct
MCEIFENEIDWDEIASIEYVGVEETIDINVTNDRLFFANGILTHNS

SEQ ID NO: 417 - DNA, 123 bp, synthetic construct
  source 1..123: mol_type = other DNA
atgaaattcaagctgaaggaaatcaccagcatcgagacaaagcactacaagggcaaggtgcacgatctgaccgtgaaccaggaccacagctacaacgtcagaggcaccgtggtgcataattct

SEQ ID NO: 418 - protein, 41 aa, synthetic construct
MKFKLKEITSIETKHYKGKVHDLTVNQDHSYNVRGTVVHNS

SEQ ID NO: 419 - DNA, 123 bp, synthetic construct
  source 1..123: mol_type = other DNA
atggaagccaagacctacatcggcaagctgaaatctagaaagatcgtgtccaacgaggatacatacgacatccagaccagcacccacaatttcttcgccaacgacatcctggtgcacaacagc

SEQ ID NO: 420 - protein, 41 aa, synthetic construct
MEAKTYIGKLKSRKIVSNEDTYDIQTSTHNFFANDILVHNS

SEQ ID NO: 421 - DNA, 108 bp, synthetic construct
  source 1..108: mol_type = other DNA
atgatcaagatcgccacaagaaagtacctgggcaagcagaacgtgtacgacatcggcgtggagagagaccacaacttcgccctgaagaacggctttatcgcctctaat

SEQ ID NO: 422 - protein, 36 aa, synthetic construct; identical to SEQ ID NO: 373

SEQ ID NO: 423 - protein, 36 aa, synthetic construct
MVKIISRKSLGTQNVYDIGVGEPHNFLLKNGLVASN

SEQ ID NO: 424 - protein, 35 aa, synthetic construct
IKIATRKYLGKQNVYDIGVERDHNFALKNGFIASN

SEQ ID NO: 425 - DNA, 88 bp, synthetic construct
  source 1..88: mol_type = other DNA; note = SaCas9 scaffold sequence
gttttagtactctgtaatgaaaattacagaatctactaaaacaaggcaaaatgccgtgtttatctcgtcaacttgttggcgagatttt

SEQ ID NO: 426 - protein, 2040 aa, Homo sapiens
MEHKEVVLLLLLFLKSAAPEQSHVVQDCYHGDGQSYRGTYSTTVTGRTCQAWSSMTPHQHNRTTENYPNAGLIMNYCRNPDAVAAPYCYTRDPGVRWEYCNLTQCSDAEGTAVAPPTVTPVPSLEAPSEQAPTEQRPGVQECYHGNGQSYRGTYSTTVTGRTCQAWSSMTPHSHSRTPEYYPNAGLIMNYCRNPDAVAAPYCYTRDPGVRWEYCNLTQCSDAEGTAVAPPTVTPVPSLEAPSEQAPTEQRPGVQECYHGNGQSYRGTYSTTVTGRTCQAWSSMTPHSHSRTPEYYPNAGLIMNYCRNPDAVAAPYCYTRDPGVRWEYCNLTQCSDAEGTAVAPPTVTPVPSLEAPSEQAPTEQRPGVQECYHGNGQSYRGTYSTTVTGRTCQAWSSMTPHSHSRTPEYYPNAGLIMNYCRNPDAVAAPYCYTRDPGVRWEYCNLTQCSDAEGTAVAPPTVTPVPSLEAPSEQAPTEQRPGVQECYHGNGQSYRGTYSTTVTGRTCQAWSSMTPHSHSRTPEYYPNAGLIMNYCRNPDAVAAPYCYTRDPGVRWEYCNLTQCSDAEGTAVAPPTVTPVPSLEAPSEQAPTEQRPGVQECYHGNGQSYRGTYSTTVTGRTCQAWSSMTPHSHSRTPEYYPNAGLIMNYCRNPDAVAAPYCYTRDPGVRWEYCNLTQCSDAEGTAVAPPTVTPVPSLEAPSEQAPTEQRPGVQECYHGNGQSYRGTYSTTVTGRTCQAWSSMTPHSHSRTPEYYPNAGLIMNYCRNPDAVAAPYCYTRDPGVRWEYCNLTQCSDAEGTAVAPPTVTPVPSLEAPSEQAPTEQRPGVQECYHGNGQSYRGTYSTTVTGRTCQAWSSMTPHSHSRTPEYYPNAGLIMNYCRNPDPVAAPYCYTRDPSVRWEYCNLTQCSDAEGTAVAPPTITPIPSLEAPSEQAPTEQRPGVQECYHGNGQSYQGTYFITVTGRTCQAWSSMTPHSHSRTPAYYPNAGLIKNYCRNPDPVAAPWCYTTDPSVRWEYCNLTRCSDAEWTAFVPPNVILAPSLEAFFEQALTEETPGVQDCYYHYGQSYRGTYSTTVTGRTCQAWSSMTPHQHSRTPENYPNAGLTRNYCRNPDAEIRPWCYTMDPSVRWEYCNLTQCLVTESSVLATLTVVPDPSTEASSEEAPTEQSPGVQDCYHGDGQSYRGSFSTTVTGRTCQSWSSMTPHWHQRTTEYYPNGGLTRNYCRNPDAEISPWCYTMDPNVRWEYCNLTQCPVTESSVLATSTAVSEQAPTEQSPTVQDCYHGDGQSYRGSFSTTVTGRTCQSWSSMTPHWHQRTTEYYPNGGLTRNYCRNPDAEIRPWCYTMDPSVRWEYCNLTQCPVMESTLLTTPTVVPVPSTELPSEEAPTENSTGVQDCYRGDGQSYRGTLSTTITGRTCQSWSSMTPHWHRRIPLYYPNAGLTRNYCRNPDAEIRPWCYTMDPSVRWEYCNLTRCPVTESSVLTTPTVAPVPSTEAPSEQAPPEKSPVVQDCYHGDGRSYRGISSTTVTGRTCQSWSSMIPHWHQRTPENYPNAGLTENYCRNPDSGKQPWCYTTDPCVRWEYCNLTQCSETESGVLETPTVVPVPSMEAHSEAAPTEQTPVVRQCYHGNGQSYRGTFSTTVTGRTCQSWSSMTPHRHQRTPENYPNDGLTMNYCRNPDADTGPWCFTMDPSIRWEYCNLTRCSDTEGTVVAPPTVIQVPSLGPPSEQDCMFGNGKGYRGKKATTVTGTPCQEWAAQEPHRHSTFIPGTNKWAGLEKNYCRNPDGDINGPWCYTMNPRKLFDYCDIPLCASSSFDCGKPQVEPKKCPGSIVGGCVAHPHSWPWQVSLRTRFGKHFCGGTLISPEWVLTAAHCLKKSSRPSSYKVILGAHQEVNLESHVQEIEVSRLFLEPTQADIALLKLSRPAVITDKVMPACLPSPDYMVTARTECYITGWGETQGTFGTGLLKEAQLLVIENEVCNHYKYICAEHLARGTDSCQGDSGGPLVCFEKDKYILQGVTSWGLGCARPNKPGVYARVSRFVTWIEGMMRNN

SEQ ID NO: 427 - DNA, 32767 bp, Homo sapiens
  source 1..32767: mol_type = genomic DNA
gtaagtcaacaatgtcctgggattgggacacactttctgggcactgctggccagtcccaaaatggaacataaggaagtggttcttctacttcttttatttctgaaatcaggtaagacatagtttttttaaattataagaattattttttctcccacaatgtagtaaaaatacatatgccatggctttatgtgcaattcatttaatttttgattcatgaaattcccagttcaaaatcttgtatatgattgaaaaattcttaaaaaaataagtttaatttccccgtgaagactgtcacggtgctggaatgaatgggcagaaaaaataatggttgatttttctaatctaaaagagtgtgcctacatgatggccagtctggctgaaaaataaatagccattgtagctaactatgcaaaggatggctaagctcttcgcttggttctcagtttcattaatttatatcatctctgttcaggtgccatgctcccctcactagcaagttgaaacaatgaaataactctttgaatatgtttggttccttgacctgttcatggagtgggactcagcatttctctctttgttatggcctgagtaaggctttccatcggtatacatttgcttcttatccctggagaaattatacacatccatttgccagatgatatacgcatataatgattcaacaaatactcagggtatttgttgagtgggttaggtccccacatttttatacatacatacacacatacacaccgtgtgtgattgtgaatgtaagtgtgtgtcctttacaaatactagcttatttagctcatggtataggtagggtagcatagtcatccccattttataaacaaagaaatctagacttaggaaaatcatgttatttgtctcgtgaccaaattcccaaatcaaggaaataaagaaacctggatttaagccagatttccaagaaaaaatctagggctcttctcactttttcatctttgttccaacatttgaaaaaataaatctaaacacattccaatgtaactgaagagcaggttaattgtttgccacttgcagaatccaattaagaagagagaagtctggtataaagaaagtgatttgcttccaaagctagcttaggggaagaaatgcagcagtcctgccgtactacttcactttaggagcagaaagtggcacttttaaaaggcaacagaggaggcgagcaaggattcaggggtccatgctagcttgggcaccttatccaccaggtagttgagcagttgcctgctggtgcctttgtgagcagggtgttgtcccttgaggcaaatctctggagggtgagagttttgtagtgggcatgctttggtttataaatcacctgtgaactcaggagttccatcttgaagcacatacatagttagatgaacttgccctgcagggagagtctgatgaaagggaggtagatgcttgcaatttaatctataaattaccagataaaattttacaagttgactttaaagtcaaacacatttgaatttagtggaagccattcaagaaaatatcaaagaaaatacagagcaggagaagattaagcaaagagttttttggggaaattggtgtctatgtctgtgtgtgtagggagtgcaggggatatgaatattctatttcagcccatggaaactaggatgtagatcactgtgaacttattcagcaggctacacccaaaggctagaacaaacttctctgccacaggattaacatatgttttaatcgacctggggggcacattctctgataagctcttttggaaagccaggctttctgtggacgtgttatctttccaatgtgtgctggaatgcccggggagaggaaaaagtttcttttacagccatgctcagtgagaagcggagaaacatcttctattcacaaattgctaagtcttttacacatgcaaatatgcatacacattcacacaccacagtgaggaagaaattctcacaccattaataaaatacatttacttcagtagcaatatacatctacattttgcctataatataaaagtatttttcctattaaaagatttgtttaatgtttcttcaccaacaaataaaccctattaaatccccattgccatatgagccctggaggtgaatcagagaaacaaaaggattgtggaaaaatcatcaggttaaaaaaagaaaaattgattctgttttgggatatttcctagcaacatgagctggggaggggatctcagcagtgatgctctatgaagcataataaaatgacacagttacaggtaacttagttaaagggggaaataaatggaagtttcctctttttgaatatcaattgtagcctgctctgctacatttcaaaaacactcttcaaaatgtttaactgaactcactgtaggaagcaccttattaatttattgtgtgttttgaagtcacactgtgagctatagaatttacccaagcacaactcttcctggaaaagagagttcaaatgagaaacagtgcggggtgaagacatggatatgggcctaaaatatctatttctcaatgatattttgatatatctatcaagtgctttttagtggattaggttcagaatgcatcagccaatgcctgttcaataatccagttttccagcatagagcatattaaattgaggaaggacaaagtcacagaggtggggagcaggtggactgtggccaaggactttgcatgaaacagtgagcgtgcatcctcctccttgccctgccctcatggtctgtgtactctcaggaggtcaggacaggcctttctgagaatgagaatctgttcatctgcctttctactggatacttgtcatcggcatacaaacacatgttctctgcagtgtgtcatctttcagaacctcccctgaccctgtattccctagaagtctcgctgctttcagagccaggcttctctcctgctgccacccccactgctcttctagtcactctttaacccactccatctgcatgtggcccccaccacacccctcaaagtggtcaaggttgtcctgttgcttaattccatggaagcttggctatcttcattttattagcctcttttggcctctcaccctgtgaaaatcactacattttgtgccagagatggagctggcatctccaggcttggaagagggctgctgaagctcagccaggtgtcctaaggagcctcaggacaggggatgctcagtagccttgcaatgggaacacagctgagccccacttggccaccctttgccacaaccaggcagaaagcagcttttgaacagatttgttgcctcagatttgatctcaaagaaaaatcgtgggcagtattggtcccaggttctgcttttttacaatttcctctgaaatctggatgcctatcaacaccttggaaaaactgaattctccccaactaatagtggtgtgtcactgtagtaagcctagtacaaaaatggccttctttgtggaggagcttcatatcctccattttttttttgcttaatttttgcccaagatgagaacataatttagttcactttttatttattcccaacatcatccatgcaccaacatttttgtaactaaaggagggaccattcagaagatgcttatcaactgtcaaagtgacagtgttacaaccaatgcacatattgtaagaaatcaaacaatggcctccaaggttcatttctacacagggattagcagatcaacatcaatcttggcaacacagttgccactgatggtgtcttattttttttatcatgacatggcaatcaagagcaaacatgatttattcttatttaagattttatggttagactaggcagatagctagatatgagcaggaggtggaagcccctgagagaatggaggtctggagaatctgaaaccccagagattacccaagtcctgcatgctagacatgagtggaggagggggaatacctaggtagaaaagaatgccccttaagatgcccagcagtcgctcactgtgcagttaacttttcagaatgctgctagatacatgctgatagggagggaagagggcaaaggagaaattcctaagagatacacggttgcagttagtatacatctgagtgctatacaaccttctttgggtggtggcaagaagcaatgcagccattacgtagaattcatatcaaacacctgtatcacaggtgttaaagaaacaagaaacattgtacttcttgtattcttaataatgatttgcaatattgtctttagtatcactgcaaacctctataaatatgatttttaaaaagtatttctttaggttggaattacttctacgcattgacttatcttcctgggtttcattagccgtacccgttgtactttcttccttaccactgtttatctcaaactcttgagattaaagtatgggctcaggagggagcgaggagcttcaggactctcacggacctccagcacagtgtagctgccttatggaaaagtggccacactgttttctgcactggtccctgcccctactattcctcactgggcagagcacagccaccctggccctgcctgaacattttagtcagtgttggctctgtgcttctctggggaggaaatccaagagacaacccacagcccctctgccatttcagctgcagcagtaccaccgttaatgcccttgggcttgagaaagaagggacctggccacttccctgacacctccagcacacagcagggaaagaattccagtttctctttcttgtgagctttcacctgctactcttcaccaggcaaggctcctggcttgggcccacagtgcaggcacctcgaactcagttgaacatttccactggctgcactctgtgtttttgtggggtgaagctcccagaggtgactgaaagtccttctgccactaacactgcagtcatactgcccttgctgtacttggactagggaaggaaaaaagatcctgagtgctttactcacaccccagtgtgccccagccaccctatggaaaagaggccagtgtgtcatccctgcaagcaccctgaggcccctgcccctgctgcccccaagctgtagagccagaatataaagctggcagaaaaatgtaaaaaggctagactggcttagcctcccagcctacatctttctcctgtgctggatccttcctgctcttgaacatcggactccaagttcttcagctgtgggacttggactgtcttccttgctcctcagattgcaggtggcctattatgggaccttgtaatcttgtgagttaataccacttaataagctcccctttgtgtgagtatatctatatctatagatagatataggtatactcactatatatacacatatatacatatactctctctctctctctctcatatatatatatatataatctcctattagttctgtccctctagagaaccccgactaatacagattttcataccagaagtggttcttgaggaacagaatattaaggatggaattctttcattggttttgggacttctggtgttggctgattaatatgattagaccaaaaaatgctaaggactctacttctaatagtatggagaacactgatagtacttggcctgaattgtttagagagttatgcaaaataaatgcatttgacactactgattcatcacttatgagaggcaaggagtttagtgactctatacataatacctttgactatatgtggagaaccaaggaacataatgaagttggttgattgctcctaagttctctggagaaagagatgaaagaaaatgatgatctcaggggatctgtctcccaccttcagaagcagatactgagccacaaatctgctaagattgccctgaatgagagttttaactcctgtagagaaagagttgaaattgtgaaaaaacagagacaagctgttatcatgcgagtagctgatctgcaacaagaggtgcatgcacagccttgccaggtgtttactgttaaagtgagggcattgactggaaaaaaatgggaccctggaacttggagtggggatgtgtgggagaaccctgatgaagctgaggacactgagtttgtgaactctgatgaaacttttttgccagaagaaacagtttccccatccccagtagtggtaacatcccctccctgacccgtgctgccattagcctttccacctttgtctgaggatgtaaaccctgcactgcttgaggcaacagtgatggccttccctgaggcagctgccaggcaagataatgttgattctcctcaagaggcacccctaatgcccctgaatgcttctagacctataactaggctaaattccttgcgggccccagaggtgaggttcagagtgtgacccatgaggaggtgcattatactctaaaagaactgcttaagctttctaatttatattggcagaaatctggagaacaggcatgggaatggatattaagggtaagggataatggtggaagggacatagagttggatcaagctgaatttattggtttggccctactaagtagggattctgcatttaatgttgcagctcggggacttagaaaaggttctgatagggccgggagcagtggctcacgcctgtaatcccagcaccttgggaggcgggggcgggcagatcacgagatcaggagattgagacaattctggctaaaatggtgaaaccccatctctgctaaaaatacaaaaattagctgggcatggtgatgcgtaactgtaatctcatctacttgggaggctgaggcaagagaactgcttgaacctgtgaggcagagattgcagtgagccaagatcgccccactgcattccagcctggtaacagagcaagactccatttccaaaaaaaaaaaaaaaaaagttataatagtttatttgcttggttagctgaaatatggattaaaagatggtccaatgttagtgagctggaaatgccttggtttaatgtagaggaagtgatccaaaggcttagggagattaggatggtggagtggattagtcactttagacctactcatcccagctgggagggtccagaagatacacccttggccgaagctttgtgaaatagatttgtgagagcagcacctgtatttttgaagagcccgtaattgctcttctctgtatgtcagatctaacagtaggaaccacagtcactcaactacaaaatttaaatacaatgggaataattggatcctgaggtggcaggggccaagtgttggcactgaaccatcaaaggcaaggtgggcataactaccataatagacagcagaggcaaagcagccatcagaatagtctgactcatgtagagctctggcattggctaattaatcatggtgttcctagaagtgaaattgatgggaaacctactgtattcctacttgatttatataaacaaaaaactgccaggtagaatggactaaagactaatctgaattataaaaacagagaatcatgggccctcaatcaatttccagactcgaacctgttacagttccagaacccactgaatgaaggggaggctggatccccttgaggaaggacaccactaggctactgacaacttatgctgttactctttctcccatccttccctaaggagacctctggccttttaccagggtaactgtgtgtactggagaaagggaagtaatgagacatttcagaaagtactggacactggctctgagctgacgttgattccagggtacccaaaacgttattgtggttccccagttaaagtaggggcttatggaggttaggtaattaatggagttttagctcatttctgacttacagtggttccagtgggtccctggacttatcctctggtcattttcccagtgccaaaatgcataatttgtatagacatacttattagctggcagaaatgccacattggctccctgactggtaggatgagggctattatggtgggaaaggccaaacagaagccattagagctgtctctacctagaaaaataaaaaaatcaaaaacaatatcccatccctggagggactgaagtgattagtgtcaccatcaaggacttgaaagacgcaggggtggtgattcccaccacatccctgttcaactctcccatttgacctgtgcagaggacagatggatcttggaaaatgatggtggattattttaagcttaaccaagtggtgactccaattgcagctgctctaccagttgtggttttgttgcttgagcaaattaacacatctcctggtgcctggtatgcagccattggcttggcaagtggctttttctccattcctgtccataagacccaccagaagcaatttgccttcagctgacaaggccagcattatacctttaccaccctacctcaggggtgtatcaactctccagctttgtgtcataatcttatttggagagaccttgctcgcttttcacttccacgagatataacactggtccattacattcatgacattatgatgattggatacagtgagcaagaagtagcaaacacactgaacttattggtgagacatttgtatgccagaggatgggaaataaatccagctaaaatttagggactttctacctcggtaaaatttctagggttccagtggcatgagacctatggagatattccttctaaggtgaagcataacttgctgcgtttggcccctcttacaaccaagaaagaggcacaatgcctggtgggcctatttggattttggaggcaacacattcctcgtttgggtgtgttactctggcccatttatcgagtgacctgaaaggctgccagatttaagtgcagtctagaacaaaagaaggctctgaaacaggtccaggctgctgtgaaagctgctctgccatttgggccacatgaccccgcagatccaatggtgcttgaggtgtcagtggcagatagggatgctgtttggagcctttggcaggcccccataggtgaatcacagtggagacctctaggattttggagcaaggccctgccacttctgcagataactactctccttttgagagacagctattggtctgttattgggctttggtggtaactgaacgtttgactgtgggtcataaagtcaccatgctacctgaacctgcctatcatgaactggttgctttctgacccatctagccatgaagtgggtcagcacagcggcatttcatcatcaaattgaagtggtgtgtatgtgatcgggcttgagcaggtcctgaaggcacaagtaagttacataaggaagtggctcaaatgcccatgttctccactcatgccaccctgccttccctcccccagcctgcaccaatggcctcatggggagttccctatgatcagttgacagaggaagggaagactaaggactggttcatagatggttctgcacgatatgcaggcaccacccgaaagtggacagctgcagcactatatccactttctaaatgcatgtgtacacttgtgctaagaaaatatctttattttatttcctttatttttcctttatcatgtgaccttagatttatggacttcacatcagcatttaagcatttaagtgttgttcatatcagcatttaaatattgttaaccttatgtaataacttttggtttggggattggtgcgtttctggttgtatgaggatagttgtattatattaggcataattatgaccttattattgtctttatttgaagattatgtatgatttcaggatgtgtgtatgggttcaagttgacaaggagttggacttgtgatggttaatactgtcaacttgattggattgaaagatgcaaagtattaatctcggttatgtctgtgagggtgtggcaaaaggagattaacatttgagtcagtgggctgggaaggcagacccacccttaatctgggtacacaccatctaatcaagttccagtgtggccagattgtaaagcagggagaaaaatgtgaaaagactagactgaattagcttcccagcctacatctttctcctgtgccaaatgcttcctgctcttgaacatcggactccaagttcttcagcgttgggagttggactggctttcttgctcctcagcttgcagagggcctgttgtggaaccttgtgatccgctgagttaatactacttaataagatcccctttatatacatataatatattatattatatataatatatataatatatattatatataatatatataatatattatatattatatataatatatattatatattatatataatatatattatatataatatatattatatattatatattatatataatatatattatatataatatatataaaatatatatatatcctattagttctgtccctctagagaaccctgactaatacaatttatgtcattaatctcatttattgatttgtatacattgaaccaaccttatatcccaggaataaaacctacttgattgtggtggattagctttttgatgtactcttggattcaattgctggtattttattgagaatttttgcatctgtgttcatcaaggatattggcttgaagttttctttttttgttgttccatatcagaatgatgacgacctcatagaatgagttagtctgtcctcttttatcttttggaattgtttcaggaggcttgatatcagctcttctttatatgactggtatactttggctaggaatctctctggtccaggggtttttctggtgtaggtttttaattactgattcaacttcagaactcattactcattattgagttctaaaactcactttcatgtactcttcaaaagactgtcttcttctgttgttgagcggggtgttctctcaaggtcgtttaggtgaaggtggttgctggtgttcttctgtatccttactgcttgtctttctctttttttattgactactgaggattaatggtgatgtgtccaactttaactctagattagtctatttctcttttagattgtaactctgttttatatattttgaagctctgttgttaggcatgtgtatttggattgttaggtcttcttgatgatgacctttatcattatgtaatgtttcttcttatctctggaagtattcgttgttctgaagtctatttgtgctgatatgaatacagccttcacagctctattttcactagtatttgtatatctttttctcagcttttaaattgagatgttcagaccatttgcattaaagtagttgttaataggattaaatttaaatctaccattaagttggttatttctctttgtcccatttaaactttgttccttttttcatatttttctgccttcatttatattgagtttatctccacgacttacttattaaattaatttttaatggttttagtattttccacaatgtttataatatatactttgattttttcacattccaccttcaaatgacagaattatactggatatatagaaatcttacatcattgcacttctccttcctccctctcaaaatgttgtgctattgctctttgtaatagaggcttacttctattatgttatagctctcataatacattgacactatttttaccctgaataatcagttgttttttaaagtgattatgactacaaatattttgaataatttctttattttaccatttctggtgctccttatcttttacagtagatcccaatttccatctggagtcacattctttctgtgaaaaacaacctttagcatttcttatagcacgggactgctgttgctgttgtctttcagcttttctttgtctgaagaagtctttattttgccttcagtttttaaaagtgattttgctgagtatagatactgggttgagagtttcattccttgtatcattttaacaatgatgttccattatattccgttttgaatagtttctgactagaaatctgatctttgtttctttgtattcaatagttcctttttctctgactgcctttaagatattctcatctttgtttttcaacagtttgactataatttgtttattattaactttttgtatttattctgcttgaggtttcctgagctccttggatttgcagattgttgatttttattgtttttgtaaaattcatagccattatctattctactgttttgttttttttttcacttctctctctctgtattcttctttttggactgtaagtattcaaatgttagatcattcatattgcttcataaaccttatatgcttcttctgcttttttttttttgtcaggaactctttttttgtatctgtgttggtttggataagttctagtagactatgttcaagtttatggattattttgttagttgtgtctaattgactcctcagtgcattcagagaattcttcatctctgatattataaatctcttcctagcattttcatgttactcttttctatagtttccatctctttgctgaaattctccccctatccatggatattgtccacctttaccacaagattctttaacatattaacataggtatcatacaaacccaaactgatagtttccagatggtgtcttttctgagtctgtctgtcttgattgctttattatttaacagtgacttatcttccctcttcagcttttggtgtgtcttgtaattgtttaatcaaacactgggtatcataaatggaggaacagtagagattgcagtaaatattatttatgctttgaaatgggcacccatcttctgttgaaaatatgttttgtggtcaattgagtcaacctagtaactggttgaactgaatttggcatttgtgcttgttgcttttatcttaaatgcaccacaggtttaaattcctccagtgatgggttgctgctatcttttgcttagagtggggcctggggtgtggaagaattttctcagtgttcctatctattattagattttagcagtcactgcatgcctgcactacagaggggatatcttcatacacataatctaaccccattgaaactgctgtttcttcttaatgaatgctcaatctttggtggaaataaacaaatgctgtatctcctggagccacttcagtcttagtcaggttctgcagggctttgaagggaatgcattctcagtattcttgtgccttatttggatggaacttgaacctgtggtgggtttggagagaaagagtagcagacgtctgctatgttgcaatgcaggatgctgggcacaagaaaatttccagtctctcctccaaggaaataagatttgatcatctacctatccctgagaagtgaagggctttgcctgcggtgctagatgcaaaaccatttttctccccccattgcccagaaacttaaggctttggcttttctgagcagtggtctagggaattgtgcaaggttttcatatttgaccctgacagcccatcaccacctacagcttgcagtgccaaatgtatctccctctgatctctcctgtcctgtggtcctcatgaacattaagaagagatttctaaaaaagagcttgcacatgagcatagtttctggtgagaagaattctgatatgttaacttcctctaaacttttaaataaaatatttctaagaattaaataaagttctagaatgatatgaatctattcctttggttttttgcacgtctgtctgcctgctaatcaagagaagagaatggtcgtaattctcagagactttttcctgtttgtgtcataaatgacttcacatttttttctgttctaagaactattcagcttgatttcttctgttttaattttagcagcacctgagcaaagccatgtggtccaggattgctaccatggtgatggacagagttatcgaggcacgtactccaccactgtcacaggaaggacctgccaagcttggtcatctatgacaccacatcaacataataggaccacagaaaactacccaaatgcgtatgtcattaatcttacagtaagcaaaacaaggtccaagtaaaatttgtcttagaaaaggtgtgcgtcaagctaacttcttatgattaaatttttctcacacatagaatgcatggcaaaatgtctgagaaacattactttgagcaaagagtatgatagaagagaaatgttaagctggctctctttcctgagagtttgataaaatcaggagaatatctggcggtggtgaggccacaataatggaaaatcagaatgtttagacagagtcagcttcaacaacactcactaaaggtcaatgtgatctttaccccttgaaattctataattctaatctccaattcctgaagtgaaggttgtgttggccttttctgtcttggctcacaagtaaatgatatgtgcatatctatggaaaggcgaatctatctttttctatatctatgtctattccaacgggtagaaacaccctgggtcctgagcaccagtggtctgaaggaatacgggttgccaggaagagagaagcaaaggcaggaaggcagatgaaagtaagaaatgagacagatgctaaacaataaaaagtgcgggaagatagacagaagctggggtctgaccacaccatggccagtctttcacacataagtgactaccaaagacaagaaaaaatgatttccgcttgttggacaatagatggtagaggaccaagggaattgcgagagagagaacaatgagatcaactcaacagatgcactggttttcttcctggagacccttcctgcactgaagggcaggagatggagcccaaaaaaaactgtagccatcttgctgaacagaggagggacattggagtttgggattattcaggtggctaggattttctaggcctgctaacaatgagaacagatttgtggaggaaaggagttctagaaatatgcatagaaatctcctcgagtcattggctaaacatgaagctgcatgtacacagaaaatagatccacaagaaagtagggcaaagaacatctacggaagagcagcaactacaatggaacagtgagctcaataaacatgacagagctcaaatagcactaagggatattggagtttggaccacacagaggagagagacttcactgaacatcttgggcattcagtagagacccaggaaaagccatactttaggagtagaattagtatattcttagaataaaggcagctccacacaaacaatagcaaaactgaaaaggaagtctccaagcatcagaatgatgtccaagtcaatgaactgcctctgagaggaaaactcaaccatctttagaggtaaacatcaaagtcaagtggctcagctatgcagtatccacagtgtgaggcctaaatataaaacttgactacacatagaaaccttttagtgtgacccacaagcaggaggaaaatcagccaatacaaacagacccagaagagacagaaatgattagaatggcataaaaatttgacatatcactatataataattgagttctaggatttaagaaaacatgaatatagaatgcaacagacaccttatccagagacagtaagagtataaagagccaaatcgaagaactactaagagatatgtcttaaatgaaaaaattactagatggcctccccatctagttagacatttcagaagaaaataccaaatgaaaaataattgcatagaacctacagaaccagatacacacatacaaaacacacgcatgcatacacacacactcaaacatgtataagcttacaaacacacacacacatccacaaatgctgaaaaatgaaatcaaccgagccacacagacataaaggaaaacataaaaagatttcctacatgtgggaagcaagtcacagaaagggggaaggagattggaacagaaatatatactgaaagcaaggatggctgaaaattttccaaatataaagaagattaaaaaatcacggactcaagaagctcaatggatcagaaaaataatttctaaaatgacaattataggatgccactgggtacatagcagttcaactgtcagagggcaaagacataatacacagaaaaatctcgtaaggaacgggaaaaacaaaaagctgtgtcttgctagaggaacagtgatacaagtgactaatgtgttcccatcagaaacactgcaacctggacacaaaagaataacattaaagtaataaacgtaagaaagaagagctcaactgagaaggctacatccagcaataaaatgccttgaagttcatccatgttggaggaatgcacattgtgcactcccctaaacaaagaaaccggaaactgtaagactttggaatcagcaggcttatgtaacaaaagaggtgaccctaaggaattaaggagaagaagaatagaacaagaagggaactttctgcagcctatataatgaagaacctagcaattggcaaatgtagatgaaaatgctacatgttttcttgatcaaacgtttatatctttttaaatgagagttgacgagttgaagcaaaatgataccaatatatttaactttaccatatgtagaagtaaaaatttgaacatgtagcataaatcatgtagggattaattggaagtgtaccactgtaagtttcttacctcatgcacgatagtatgtaatactaataaaaggttaatgtgtgggttcaaagggatattgcaaatcctagagcaatcacaaagtttttaactctgaggtttgttgtataataacaatattttatgtattcaaaagagggaagccaaggaagaaaaaaaagtctttaaagagctctggctcttagtacatccagttgctcattgaatgagcttcctggaatggagggtctgggactgagactaggccacatgtgtagagccactagagacacaatgttggatccccatggcccataatacatttcccattttctcaggcagccacaggtcatgaatgtgaggatactgagaggttggagcaacgttcttgggaggcataaggaagagcgaatgcttcaagatccccgcagcccaaactcctcagctgctttgcctcctaattcattgttttttgctcctccatagctgtccgacctcttcagatctcttagtcttcctgccatcttcctttatgccatgggacccactgttctttcaactcatcccccagttctggagtggctgtggacagcagaggatagactgagagcaggagagaaggtcctgcccaggaacccattctagagatactgcattctgcctgggagcaagttttccagggcagctttgagaagtcttgcagaaacaaacctacttgaccgacatgatatgggaatgacagacagtaatactatttgcacaatgcttttccatgggaaaggtagagccttttcactaggttttgagtacatggagtgtgagagttgacctggaaaggttatcctccttgatgccatgttttctctgaagaactacatgttcgttgcaactcccacattagaatatgaagtcctaccgagagagatacggagactagacagatacagatgcatttgcatgtgaatacacaatcccacaatacagacgtcaaaacccataccagttattccagagagatggattgggcagaaggcagaaggagaatactctgatcgtttttcggccacgtgtgtgtgttatctcagtgtttctaagaagcgtttgctactttagattttttatttaaaaaaaatagtaataatctattaagtatgagagatgtgcagagaggattagtgatcgagagccatttttgctggtggcaatcatatggtacttttaatgggaatattagaaaggcaccggtaatgaccttgttgcagcacaaaggagagagtgtggggtgcccctgcatgttgtcccacctcttgtgacgtgtatcgttttggaatttccagtggcttgatcatgaactactgcaggaatccagatgctgtggcagctccttattgttatacgagggatcccggtgtcaggtgggagtactgcaacctgacgcaatgctcagacgcagaagggactgccgtcgcgcctccgactgttaccccggttccaagcctagaggctccttccgaacaaggtaaggagtctgtggccagacatctacacgcttcgatgctgggatgaaaagccatggaaattcccactgatgcagccgccttcaatggtaaacggatgctcgagtgttgcctgagttctaccatgtaggaggaagcctccgtgcactctctgggggagccagcggagtgatttctggtgcaacgtggttgggctttgtctttaggatgggcacaaaccctccagggggatcgacttcaaaattcaccttgttgtaaaacgggctacctcagtgtcccagccaaaatttttattgtaacatgctgtcaggtgtgtcactctttccaagccagtaagcttttccggggatttcttcaagtagccagcattcagagcaatcttcagcattgcagattctgagaaatgtggctctggagcctgtcaccctcgagaaacctaagagggctgcattgattccatgtggccctgggtctatggagcagtacatgagctcccagtgctctaaggctcttcagccctaggctttgaagggagtgatttctcagtattcttaaacctctttctgatgacacttgtacctgtgaggggtctagagagaaagagtagtagactcctactttactacaattcaggatgcagggcatgagaggattccctctctcctccaagggaagaagcttttggcgtgcacacatccctgagaagcaaagtgtctttgtcttcagtcagatacataggaccgttttctgccccatggcccggaagccaaaggccttggctttcatgatcaacggtctagggaaacatgcaaaatttccatgtctgtcccaaactctgcccccgacagccaattaccacctgcagcccgcattgccaaatgcggtgccgtttgcatgaagattcagtagagtttcctagaaaggtgctacctcgtgagctcactttccaatgaggaatctgatctgttgtgtttctctaaggtgtcaggtgaaatatttccaagaacttactacagttctagaatgggaggaatctgttgctttggtgtttgtttgttggtcggttttctcacatccatctgcctatggataaggaaaagagaacggtcgtaattctcatagactcctttctggttgtgtcacaaatggcttcacatgtttctctatgctcagagatactcagcttgatttcccgtgttttcatttcagcaccgactgagcaaaggcctggggtgcaggagtgctaccatggtaatggacagagttatcgaggcacatactccaccactgtcacaggaagaacctgccaagcttggtcatctatgacaccacactcgcatagtcggaccccagaatactacccaaatgcgtatgtctttgttctttaccataagagaagaaagggccaagtgaagtttctgttacaagagatgtgtctcaagctgagttctccgaactcaacttgtgacagatgcagatggcgtagcaaaatgtctcaggatgattgccttggagctaagggtctgagagaagggaaatgttaagctccctctccttcctcctagttctattgagcagaagggaaatctggaggtgaggagatcacattatgaagaaagtcagaatgacaaaggaccagacacttagattacccttccacaacaccaactaaacgtcaatggagactttccagttggaattccgttattctggcttccacttcctgaagggaaggttgcgtttgccttttctctctgggttcaagaggaaagaataggtgcttatttatggacaggtgaattgatctgtttctatatctacgtatattccgattgtcagaaaaacactcgttcctaagtaccagtggcctgaagggatacaggttcccagcaagagaagatccaaggaaggaaggcagatgagagtcagcacagagagggatgctgaaaagtaaaagggatgggtggatggagagaagcccgggtctgaccacccaatggccaatattttggccacaagcgactaccagagacatggaaaaatggtttctacatgtgggacaacagatggtagaggacctagagaattgagagaggggcaatgatgggctccactccgcagatgccttggctttcttcctggatacccttcctgcactgaatagcaaggagatggagcccaagcagactgtagccatcttgctgaatggaggagagggattggagtttgggatgactgtggtagctgaaatttttctaggtctgctagaaataagaactggtttgtgtggaggaaaagagctctacaaatacgcatagaagtctcctccagtcgttggcctgacatgacgctgcctgtgcacaggaaatggttccacgagaaagtgtggcaaagaacatttactgagaaacagcaagtacaagagcacaggaagctcaataaagaagagagagatcacatagcactctgggatactggagttcttcccagctagaccagagagtcctcacggagcacattgccaattcagtggagaccccagaacagccgtaatttaaaggtacacttagtatattactagaataaagtcagctgcagacaaccccttgcacagctggaaagcaagtgtccaagcatcaaatcggtttccaatcaatgaagtgcctgtgagaggaaatctcaactctctttagaagtaaacaacaaagtcgattgcctcagctatgcggtatccgcagagtgagtcctaaatttaaaatctgactacatgtagaaaagcgtttcgtgtgacccatgaccaggaaataaatcgggtaatacaaacaggctcaggaatgagagaaatgattagaattgcgtgaaaatttgacatatcagtatgataactgatttcaaatatttaaaaaaacaacatgcaagaaagcagatatcatatcaagagaaattaacagtacagaatagccaaattaaattaaagaggtagtataaaaaaagtatgtcttaattgaaaaaaattactgtatggccggctgatcaatttagacgtttcagaggaaaacattacccaacacacaattctagagaacctacagaatgagctacacacacacacacacacacacacacacacactgaaaacacacccatactcacacacacgcagaaactcacaagttctaacacacacagacacgcgcacccctgaagaaacagtgaaatataaaattaagcgagcctcacagacatgtaggaaaatatgaaaagatttcctgcatgtgggaagcaagtcacagtaaagagcaagggagtttataatagaaacaaataccagaatcaaggatggctgataacttttcaattacgaagaacattaaaaaaaatcacagaatcgtgaaactcaagggatcatatagggaatttcggaaaaaaaacccaacctgtatgatgtacttttgtacatcacagttcgaaggtaacaaggcaaagatgtaataagaagaaacctgtcacgagaaactggaggaaaaagagctgtgtcttcctacaagtacactgatacaaattgccaatgtgttcacctcagaaacactggaagccagataccagggaatattgttaaaatgataatcaggaacaaaaagagatcaaccgggaatgctgaatccagcaataaaatgccttgaaggtcatccatgtcggataaatgcatattgtgcactgccccaaagaaagaaaccggaaactgtaagaattggaaatcagcaggcttatgtaacaagagaggtgacccgaaggaattaggtagaagaagaattgaacaagaaaggaactttctgcagcccacgtaatgaagaatccagcaattggcaaatgtagatagatgtaaatgcaaaatattttcttgatcaaatttctatatctttgtaaatgagagttgactacttgaaacaaaatgatagcaagatatttaacttcagcatatgtagaggtaagaatttgaaatggtagcataaatcacgaagggattaattcgaagtgtaccgttgtaagtttctttacctcatgcacgatggtgtgtcatattaataaaagggtactgtgcgggttcgaagggatattgcaaatcctagagcaatcacaaaggtttgaactctgaggtttttggtataataagaatagtccatgcattcaaaagagggaagccaaggaagaactagaagtctttcaagagctcaggctcttatacatccagttgctcattgaaccagcttcctggaatggagggtctggggttgagactaggccacaagtctagagtctctagagagacagtgttggaaccccatggcccataatacatttcccattttctcaggcagccagaggtcatgaatgtgaggatactgggaggttggagcaacgttcttgggaggcataaggaagagcgaatgcttcaagatccccgcagcccaaactactcgcctgctttgccccctaatgcatttttctctgctgctccgtagctgtccgacctcttcagatctcttagtccaccctgccgtcttcctttatgccatgggtcccactgttctttcaactcatccccctttccctcagtcccggagtagctgcggccagcagagggtagactgagagcaggagagaaggacctgcctaggaaccccttctagagatactgcatcctgcctgggagcaagttttccagggcagctttgagaagtcttggagaaacaaacctactaaacctgacagacagtaatactatttgcacaatgcttttctgtgggaaaggtagagccttttcactacgtattgagtacatagagtgtgagggttgacctggaacggctatcctcctggatgacgtgtgttttctgaagaactacatgttcgttgcaactcccacattagaatatgaagtcctaccgagagagatacggagactagacagatacagatgcatttgcatgtgaatacacaatcccacaatacagacgtcaaaacccataccagttattccagagagatggattgggcagaaggcagaaggagaatactctgatcgtttttcggccacgtgtgtgtgttatctcagtgtttctaagaagcgtttgctactttagattttttatttaaaaaaatagtaataatctattaagtatgagagatgtgcagagaggattagtgatcgagagccatttttgctggtggcaatcatatggtacttttaatgggaatattagaaaggcaccggtaatgaccttgttgcagcacaaaggagagagtgtggggtgcccctgcatgttgtcccacctcttgtgacgtgtatcgttttggaatttccagtggcttgatcatgaactactgcaggaatccagatgctgtggcagctccttattgttatacgagggatcccggtgtcaggtgggagtactgcaacctgacgcaatgctcagacgcagaagggactgccgtcgcgcctccgactgttaccccggttccaagcctagaggctccttccgaacaaggtaaggagtctgtggccagacatctacacgcttcgatgctgggatgaaaagccatggaaattcccactgatgcagccgccttcaatggtaaacggatgctcgagtgttgcctgagttctaccatgtaggaggaagcctccgtgcactctctgggggagccagcggagtgatttctggtgcaacgtggttgggctttgtctttaggatgggcacaaaccctccagggggatcgacttcaaaattcaccttgttgtaaaacgggctacctcagtgtcccagccaaaatttttattgtaacatgctgtcaggtgtgtcactctttccaagccagtaagcttttccggggatttcttcaagtagccagcattcagagcaatcttcagcattgcagattctgagaaatgtggctctggagcctgtcaccctcgagaaacctaagagggctgcattgattccatgtggccctgggtctatggagcagtacatgagctcccagtgctctaaggctcttcagccctaggctttgaagggagtgatttctcagtattcttaaacctctttctgatgacacttgtacctgtgaggggtctagagagaaagagtagtagactcctactttactacaattcaggatgcagggcatgagaggattccctctctcctccaagggaagaagcttttggcgtgcacacatccctgagaagcaaagtgtctttgtcttcagtcagatacataggaccgttttctgccccatggcccggaagccaaaggccttggctttcatgatcaacggtctagggaaacatgcaaaatttccatgtctgtcccaaactctgcccccgacagccaattaccacctgcagcccgcattgccaaatgcggtgccgtttgcatgaagattcagtagagtttcctagaaaggtgctacctcgtgagctcactttccaatgaggaatctgatctgttgtgtttctctaaggtgtcaggtgaaatatttccaagaacttactacagttctagaatgggaggaatctgttgctttggtgtttgtttgttggtcggttttctcacatccatctgcctatggataaggaaaagagaacggtcgtaattctcatagactcctttctggttgtgtcacaaatggcttcacatgtttctctatgctcagagatactcagcttgatttcccgtgttttcatttcagcaccgactgagcaaaggcctggggtgcaggagtgctaccatggtaatggacagagttatcgaggcacatactccaccactgtcacaggaagaacctgccaagcttggtcatctatgacaccacactcgcatagtcggaccccagaatactacccaaatgcgtatgtctttgttctttaccataagagaagaaagggccaagtgaagtttctgttacaagagatgtgtctcaagctgagttctccgaactcaacttgtgacagatgcagatggcgtagcaaaatgtctcaggatgattgccttggagctaagggtctgagagaagggaaatgttaagctccctctccttcctcctagttctattgagcagaagggaaatctggaggtgaggagatcacattatgaagaaagtcagaatgacaaaggaccagacacttagattacccttccacaacaccaactaaacgtcaatggagactttccagttggaattccgttattctggcttccacttcctgaagggaaggttgcgtttgccttttctctctgggttcaagaggaaagaataggtgcttatttatggacaggtgaattgatctgtttctatatctacgtatattccgattgtcagaaaaacactcgttcctaagtaccagtggcctgaagggatacaggttcccagcaagagaagatccaaggaaggaaggcagatgagagtcagcacagagagggatgctgaaaagtaaaagggatgggtggatggagagaagcccgggtctgaccacccaatggccaatattttggccacaagcgactaccagagacatggaaaaatggtttctacatgtgggacaacagatggtagaggacctagagaattgagagaggggcaatgatgggctccactccgcagatgccttggctttcttcctggatacccttcctgcactgaatagcaaggagatggagcccaagcagactgtagccatcttgctgaatggaggagagggattggagtttgggatgactgtggtagctgaaatttttctaggtctgctagaaataagaactggtttgtggaggaaaagagctctacaaatacgcatagaagtctcctccagtcgttggcctgacatgacgctgcctgtgcacaggaaatggttccacgagaaagtgtggcaaagaacatttactgagaaacagcaagtacaagagcacaggaagctcaataaagaagagagagatcacatagcactctgggatactggagttcttcccagctagaccagagagtcctcacggagcacattgccaattcagtggagaccccagaacagccgtaatttaaaggtacacttagtatattactagaataaagtcagctgcagacaaccccttgcacagctggaaagcaagtgtccaagcatcaaatcggtttccaatcaatgaagtgcctgtgagaggaaatctcaactctctttagaagtaaacaacaaagtcgattgcctcagctatgcggtatccgcagagtgagtcctaaatttaaaatctgactacatgtagaaaagcgtttcgtgtgacccatgaccaggaaataaatcgggtaatacaaacaggctcaggaatgagagaaatgattagaattgcgtgaaaatttgacatatcagtatgataactgatttcaaatatttaaaaaaacaacatgcaagaaagcagatatcatatcaagagaaattaacagtacagaatagccaaattaaattaaagagctagtataaaaaaagtatgtcttaattgaaaaaaattactgtatggccggctgatcaatttagacgtttcagaggaaaacattacccaacacacaattctagagaacctacagaatgagctacacacacacacacacacacacacacaaactgaaaacacacccatactcacacacacgcagaaactcacaagttctaacacacacagacacgcgcacccctgaagaaacagtgaaatataaaattaagcgagcctcacagacatgtaggaaaatatgaaaagatttcctgcatgtgggaagcaagtcacagtaaagagcaagggagtttggaatagaaacaaataccggaatcaaggatggctgataacttttcaattacgaagaacattaaaaaaaatcacagaatcgtgaaactcaagggatcacatagggaatttcggaaaaaaaacccaacctgtatgatgtacttttgtacatcacagttcgaaggtaacaaggcaaagatataataagaagaaacctgtcacgagaaactggaggaaaaagagctgtgtcttcctacaagtacactgatacaaattgccaatgtgttcacctcagaaacactggaagccagataccagggaatattgttaaaatgataatcaggaacaaaaagagatcaaccgggaatgctgaatccagcaataaaatgccttgaagatcatccatgtcggataaatgcatattgtgcactgccccaaagaaagaaaccggaaactgtaagaattggaaatcagcaggcttatgtaacaagagaggtgacccgaaggaattaggtagaagaagaattgaacaagaaaggaactttctgcagcccacgtaatgaagaatccagcaattggcaaatgtagatagatgtaaatgcaaaatattttcttgatcaaatttctatatctttgtaaatgagagttgactacttgaaacaaaatgatagcaagatatttaacttcagcatatgtagaggtaagaatttgaaatggtagcataaatcacgaagggattaattcgaagtgtaccgttgtaagtttctttacctcatgcacgatggtgtgtcatattaataaaagggtactgtgcgggttcgaagggatattgcaaatcctagagcaatcacaaaggtttgaactctgaggtttttggtataataagaatagtccatgcattcaaaagagggaagccaaggaagaactagaagtctttcaagagctcaggctcttatacatccagttgctcattgaaccagcttcctggaatggagggtctggggttgagactaggccacaagtctagagtctctagagagacagtgttggaaccccatggcccataatacatttcccattttctcaggcagccagaggtcatgaatgtgaggatactgggaggttggagcaacgttcttgggaggcataaggaagagcgaatgcttcaagatccccgcagcccaaactactcgcctgctttgccccctaatgcatttttctctgctgctccgtagctgtccgacctcttcagatctcttagtccaccctgccgtcttcctttatgccatgggtcccactgttctttcaactcatccccctttccctcagtcccggagtagctgcggccagcagagggtagactgagagcaggagagaaggacctgcctaggaaccccttctagagatactgcatcctgcctgggagcaagttttccagggcagctttgagaagtcttggagaaacaaacctactaaacctgacagacagtaatactatttgcacaatgcttttctgtgggaaaggtagagccttttcactacgtattgagtacatagagtgtgagggttgacctggaacggctatcctcctggatgacgtgtgttttctgaagaactacatgttcgttgcaactcccacattagaatatgaagtcctaccgagagagatacggagactagacagatacagatgcatttgcatgtgaatacacaatcccacaatacagacgtcaaaacccataccagttattccagagagatggattgggtaggaggcagaaggagaatactctgatcgtttttcggccacgtgtgtgtgttatctcagtgtttctaagaagcgtttgctactttagattttttatttaaaaaaaatagtaataatctattaagtatgagagatgtgcagagaggattagtgatcgagagccatttttgctggtggcaatcatatggtacttttaatgggaatattagaaaggcaccggtaatgaccttgttgcagcacaaaggagagagtgtggggtgcccctgcatgttgtcccacctcttgtgacgtgtatcgttttggaatttccagtggcttgatcatgaactactgcaggaatccagatgctgtggcagctccttattgttatacgagggatcccggtgtcaggtgggagtactgcaacctgacgcaatgctcagacgcagaagggactgccgtcgcgcctccgactgttaccccggttccaagcctagaggctccttccgaacaaggtaaggagtctgtggccagacatctacacgcttcgatgctgggatgaaaagccatggaaattcccactgatgcagccgccttcaatggtaaacggatgctcgagtgttgccggagttctgccatgttgggggaagcctccgtgtactctctgggggagccagcggagtgatttctggtgcaacttgggtgggctttgtctttagaatgggcacaaaccttccagggtgatgggcttcacaactcacctccttctaaaatgggctatctcagtgtcttagccaaaatttttattgtaacgtgctgtcaggtgtgtgattctttctgtcgcagtaagcttttctggggatttcttcaagtagccagcagtcagtgcaatcttcagcattgcagatttcaaaaaatgtggctctggagcctgtcatcctcgagaaacctaacagggctgcattaattccatatggtcctgggtctatggagcagtatatgagctcccaatgctctaaggctcttcagtcctaggctttgaagggagtgatttctcagtgttcttaaacctctttctgatggcacttgtacctgtgaggggtctagagagaaaggttagtagacttctcctttactgcaattcaggatgcagggcatgagaagattccctccctcctccaagggaagaaggttttggcgtgcacacatccttgagaagcaaagtgtctttgccttcagtcagatatataggatcgttttctgccccatggcctggaagccagaggccttggctttcatgatcaacgatctagggaaacatgcaaaatttccatgtctttcccctcctctgccctcgacagccaattaccacctgcatcctgcattgccaaatgcagtgccctttgtatgaacattcagtagagtttcatagaaaggtgctacttcgtgagcgcactttgcagtgagaaggagtctgttctgttctgtttttctaaggatttcaggtgaaatatttcctagaacttactacagttctagattggtaggaatctgtaggtttgctgtatgttttttggttggttttctcccatccatctgcctacaggtaagggaaagataacgttcgtaattctcatagactcctttctggttgtgtcataaatggcttcacatatttcgttattctcagagatactcagtttatttcttgtgttttcatttcagcaccgactgagcagaggcctggggtgcaggagtgctaccacggtaatggacagagttatcgaggcacatactccaccactgtcactggaagaacctgccaagcttggtcatctatgacaccacactcgcatagtcggaccccagaatactacccaaatgcgtatgtctttgttctttaccataagagaagaaagggccaagtgaagtttctgttacaagagatgtgtctcaagctgagttctccgaactcaacttgtgacagatgcagatggcgtagcaaaatgtctcaggatgattgccttggagctaagggtctgagagaagggaaatgttaagctccctctccttcctcctagttctattgagcagaagggaaatctggaggtgaggagatcacattatgaagaaagtcagaatgacaaaggaccagacacttagattacccttccacaacaccaactaaacgtcaatggagactttccagttggaattccgttattctggcttccacttcctgaagggaaggttgcgtttgccttttctctctgggttcaagaggaaagaataggtgcttatttatggacaggtgaattgatctgtttctatatctacgtatattccgattgtcagaaaaacactcgttcctaagtaccagtggcctgaagggatacaggttcccagcaagagaagatccaaggaaggaaggcagatgagagccagcacagagagggatgctgaaaagtaaaagggatgggtggatggagagaagcccgggtctgaccacccaatggccaatattttggccacaagcgactaccagagacatggaaaaatggtttctacatgtgggacaacagatggtagaggacctagagaattgagagaggggcaatgatgggctccactccgcagatgccttggctttcttcctggatacccttcctgcactgaatagcaaggagatggagcccaagcagactgtagccatcttgctgaatggaggagagggattggagtttgggatgactgtggtagctgaaatttttctaggtctgctagaaataagaactggtttgtggaggaaaagagctctacaaatacgcatagaagtctcctccagtcgttggcctgacatgacgctgcctgtgcacaggaaatggttccacgagaaagtgtggcaaagaacatttactgagaaacagcaagtacaagagcacaggaagctcaataaagaagagagagatcacatagcactctgggatactggagttcttcccagctagaccagagagtcctcacggagcacattgccaattcagtggagaccccagaacagccgtaatttaaaggtacacttagtatattactagaataaagtcagctgcagacaaccccttgcacagctggaaagcaagtgtccaagcatcaaatcggtttccaatcaatgaagtgcctgtgggaggaaatctcaactctctttagaagtaaacaacaaagtcgattgcctcagctatgcggtatccgcagagtgagtcctaaatttaaaatctgactacatgtagaaaagcgtttcgtgtgacccatgaccaggaaataaatcgggtaatacaaacaggctcaggaatgagagaaatgattagaattgcgtgaaaatttgacatatcagtatgataactgatttcaaatatttaaaaaaacaacatgcaagaaagcagatatcatatcaagagaaattaacagtacagaatagccaaattaaattaaagagctagtataaaaaaagtatgtcttaattgaaaaaaattactgtatggccggctgatcaaattagacgtttcagaggaaaacattacccaacacacaattctagagaacctacagaatgagctacacacacacacacacacacacacacacacactgaaaacacacccatactcacacacacgcagaaactcacaagttctaacacacacagacacgcgcacccctgaagaaacagtgaaatataaaattaagcgagcctcacagacatgtaggaaaatatgaaaagatttcctgcatgtgggaagcaagtcacagtaaagagcaagggagtttggaatagaaacaaataccggaatcaaggatggctgataacttttcaattacgaagaacattaaaaaaaatcacagaatcgtgaaactcaagggatcatatagggaatttcggaaaaaaaacccaacctgtatgatgtacttttgtacatcacagttcgaaggtaacaaggcaaagatataataagaagaaacctgtcacgagaaactggaggaaaaagagctgtgtcttcctacaagtacactgatacaaattgccaatgtgttcacctcagaaacactggaagccagataccagggaatattg

SEQ ID NO: 428 - protein, 1606 aa, synthetic construct
MKRTADGSEFESPKKKRKVSEVEFSHEYWMRHALTLAKRARDEREVPVGAVLVLNNRVIGEGWNRAIGLHDPTAHAEIMALRQGGLVMQNYRLYDATLYSTFEPCVMCAGAMIHSRIGRVVFGVRNAKTGAAGSLMDVLHHPGMNHRVEITEGILADECAALLCRFFRMPRRVFNAQKKAQSSTDSGGSSGGSSGSETPGTSESATPESSGGSSGGSDKKYSIGLAIGTNSVGWAVITDEYKVPSKKFKVLGNTDRHSIKKNLIGALLFDSGETAEATRLKRTARRRYTRRKNRICYLQEIFSNEMAKVDDSFFHRLEESFLVEEDKKHERHPIFGNIVDEVAYHEKYPTIYHLRKKLVDSTDKADLRLIYLALAHMIKFRGHFLIEGDLNPDNSDVDKLFIQLVQTYNQLFEENPINASGVDAKAILSARLSKSRRLENLIAQLPGEKKNGLFGNLIALSLGLTPNFKSNFDLAEDAKLQLSKDTYDDDLDNLLAQIGDQYADLFLAAKNLSDAILLSDILRVNTEITKAPLSASMIKRYDEHHQDLTLLKALVRQQLPEKYKEIFFDQSKNGYAGYIDGGASQEEFYKFIKPILEKMDGTEELLVKLNREDLLRKQRTFDNGSIPHQIHLGELHAILRRQEDFYPFLKDNREKIEKILTFRIPYYVGPLARGNSRFAWMTRKSEETITPWNFEEVVDKGASAQSFIERMTNFDKNLPNEKVLPKHSLLYEYFTVYNELTKVKYVTEGMRKPAFLSGEQKKAIVDLLFKTNRKVTVKQLKEDYFKKIECFDSVEISGVEDRFNASLGTYHDLLKIIKDKDFLDNEENEDILEDIVLTLTLFEDREMIEERLKTYAHLFDDKVMKQLKRRRYTGWGRLSRKLINGIRDKQSGKTILDFLKSDGFANRNFMQLIHDDSLTFKEDIQKAQVSGQGDSLHEHIANLAGSPAIKKGILQTVKVVDELVKVMGRHKPENIVIEMARENQTTQKGQKNSRERMKRIEEGIKELGSQILKEHPVENTQLQNEKLYLYYLQNGRDMYVDQELDINRLSDYDVDHIVPQSFLKDDSIDNKVLTRSDKNRGKSDNVPSEEVVKKMKNYWRQLLNAKLITQRKFDNLTKAERGGLSELDKAGFIKRQLVETRQITKHVAQILDSRMNTKYDENDKLIREVKVITLKSKLVSDFRKDFQFYKVREINNYHHAHDAYLNAVVGTALIKKYPKLESEFVYGDYKVYDVRKMIAKSEQEIGKATAKYFFYSNIMNFFKTEITLANGEIRKRPLIETNGETGEIVWDKGRDFATVRKVLSMPQVNIVKKTEVQTGGFSKESIRPKRNSDKLIARKKDWDPKKYGGFVSPTVAYSVLVVAKVEKGKSKKLKSVKELLGITIMERSSFEKNPIDFLEAKGYKEVKKDLIIKLPKYSLFELENGRKRMLASARFLQKGNELALPSKYVNFLYLASHYEKLKGSPEDNEQKQLFVEQHKHYLDEIIEQISEFSKRVILADANLDKVLSAYNKHRDKPIREQAENIIHLFTLTNLGAPRAFKYFDTTIDRKAYRSTKEVLDATLIHQSITGLYETRIDLSQLGGDEGADKRTADGSEFESPKKKRKV

SEQ ID NO: 429 - protein, 1594 aa, synthetic construct
MKRTADGSEFESPKKKRKVDKKYSIGLAIGTNSVGWAVITDEYKVPSKKFKVLGNTDRHSIKKNLIGALLFDSGETAEATRLKRTARRRYTRRKNRICYLQEIFSNEMAKVDDSFFHRLEESFLVEEDKKHERHPIFGNIVDEVAYHEKYPTIYHLRKKLVDSTDKADLRLIYLALAHMIKFRGHFLIEGDLNPDNSDVDKLFIQLVQTYNQLFEENPINASGVDAKAILSARLSKSRRLENLIAQLPGEKKNGLFGNLIALSLGLTPNFKSNFDLAEDAKLQLSKDTYDDDLDNLLAQIGDQYADLFLAAKNLSDAILLSDILRVNTEITKAPLSASMIKRYDEHHQDLTLLKALVRQQLPEKYKEIFFDQSKNGYAGYIDGGASQEEFYKFIKPILEKMDGTEELLVKLNREDLLRKQRTFDNGSIPHQIHLGELHAILRRQEDFYPFLKDNREKIEKILTFRIPYYVGPLARGNSRFAWMTRKSEETITPWNFEEVVDKGASAQSFIERMTNFDKNLPNEKVLPKHSLLYEYFTVYNELTKVKYVTEGMRKPAFLSGEQKKAIVDLLFKTNRKVTVKQLKEDYFKKIECFDSVEISGVEDRFNASLGTYHDLLKIIKDKDFLDNEENEDILEDIVLTLTLFEDREMIEERLKTYAHLFDDKVMKQLKRRRYTGWGRLSRKLINGIRDKQSGKTILDFLKSDGFANRNFMQLIHDDSLTFKEDIQKAQVSGQGDSLHEHIANLAGSPAIKKGILQTVKVVDELVKVMGRHKPENIVIEMARENQTTQKGQKNSRERMKRIEEGIKELGSQILKEHPVENTQLQNEKLYLYYLQNGRDMYVDQELDINRLSDYDVDHIVPQSFLKDDSIDNKVLTRSDKNRGKSDNVPSEEVVKKMKNYWRQLLNAKLITQRKFDNLTKAERGGLSELDKAGFIKRQLVETRQITKHVAQILDSRMNTKYDENDKLIREVKVITLKSKLVSDFRKDFQFYKVREINNYHHAHDAYLNAVVGTALIKKYPKLESEFVYGDYKVYDVRKMIAKSEQEIGKATAKYFFYSNIMNFFKTEITLANGEIRKRPLIETNGETGEIVWDKGRDFATVRKVLSMPQVNIVKKTEVQTGGFSKESILPKRNSDKLIARKKDWDPKKYGGFVSPTVAYSVLVVAKVEKGKSKKLKSVKELLGITIMERSSFEKNPIDFLEAKGYKEVKKDLIIKLPKYSLFELENGRKRMLASARELQKGNELALPSKYVNFLYLASHYEKLKGGSSGSETPGTSESATPESSGSEVEFSHEYWMRHALTLAKRARDEREVPVGAVLVLNNRVIGEGWNRAIGLHDPTAHAEIMALRQGGLVMQNYRLYDATLYSTFEPCVMCAGAMIHSRIGRVVFGVRNAKTGAAGSLMDVLHHPGMNHRVEITEGILADECAALLCRFFRMPRRVFNAQKKAQSSTDSPEDNEQKQLFVEQHKHYLDEIIEQISEFSKRVILADANLDKVLSAYNKHRDKPIREQAENIIHLFTLTNLGAPAAFKYFDTTIDRKQYRSTKEVLDATLIHQSITGLYETRIDLSQLGGDEGADKRTADGSEFESPKKKRKV

SEQ ID NO: 430 - protein, 1588 aa, synthetic construct
MSEVEFSHEYWMRHALTLAKRARDEREVPVGAVLVLNNRVIGEGWNRAIGLHDPTAHAEIMALRQGGLVMQNYRLYDATLYSTFEPCVMCAGAMIHSRIGRVVFGVRNAKTGAAGSLMDVLHHPGMNHRVEITEGILADECAALLCRFFRMPRRVFNAQKKAQSSTDSGGSSGGSSGSETPGTSESATPESSGGSSGGSDKKYSIGLAIGTNSVGWAVITDEYKVPSKKFKVLGNTDRHSIKKNLIGALLFDSGETAEATRLKRTARRRYTRRKNRICYLQEIFSNEMAKVDDSFFHRLEESFLVEEDKKHERHPIFGNIVDEVAYHEKYPTIYHLRKKLVDSTDKADLRLIYLALAHMIKFRGHFLIEGDLNPDNSDVDKLFIQLVQTYNQLFEENPINASGVDAKAILSARLSKSRRLENLIAQLPGEKKNGLFGNLIALSLGLTPNFKSNFDLAEDAKLQLSKDTYDDDLDNLLAQIGDQYADLFLAAKNLSDAILLSDILRVNTEITKAPLSASMIKRYDEHHQDLTLLKALVRQQLPEKYKEIFFDQSKNGYAGYIDGGASQEEFYKFIKPILEKMDGTEELLVKLNREDLLRKQRTFDNGSIPHQIHLGELHAILRRQEDFYPFLKDNREKIEKILTFRIPYYVGPLARGNSRFAWMTRKSEETITPWNFEEVVDKGASAQSFIERMTNFDKNLPNEKVLPKHSLLYEYFTVYNELTKVKYVTEGMRKPAFLSGEQKKAIVDLLFKTNRKVTVKQLKEDYFKKIECFDSVEISGVEDRFNASLGTYHDLLKIIKDKDFLDNEENEDILEDIVLTLTLFEDREMIEERLKTYAHLFDDKVMKQLKRRRYTGWGRLSRKLINGIRDKQSGKTILDFLKSDGFANRNFMQLIHDDSLTFKEDIQKAQVSGQGDSLHEHIANLAGSPAIKKGILQTVKVVDELVKVMGRHKPENIVIEMARENQTTQKGQKNSRERMKRIEEGIKELGSQILKEHPVENTQLQNEKLYLYYLQNGRDMYVDQELDINRLSDYDVDHIVPQSFLKDDSIDNKVLTRSDKNRGKSDNVPSEEVVKKMKNYWRQLLNAKLITQRKFDNLTKAERGGLSELDKAGFIKRQLVETRQITKHVAQILDSRMNTKYDENDKLIREVKVITLKSKLVSDFRKDFQFYKVREINNYHHAHDAYLNAVVGTALIKKYPKLESEFVYGDYKVYDVRKMIAKSEQEIGKATAKYFFYSNIMNFFKTEITLANGEIRKRPLIETNGETGEIVWDKGRDFATVRKVLSMPQVNIVKKTEVQTGGFSKESILPKRNSDKLIARKKDWDPKKYGGFVSPTVAYSVLVVAKVEKGKSKKLKSVKELLGITIMERSSFEKNPIDFLEAKGYKEVKKDLIIKLPKYSLFELENGRKRMLASARELQKGNELALPSKYVNFLYLASHYEKLKGSPEDNEQKQLFVEQHKHYLDEIIEQISEFSKRVILADANLDKVLSAYNKHRDKPIREQAENIIHLFTLTNLGAPAAFKYFDTTIDRKQYRSTKEVLDATLIHQSITGLYETRIDLSQLGGDEGADKRTADGSEFESPKKKRKV

SEQ ID NO: 431 - protein, 1594 aa, synthetic construct
MKRTADGSEFESPKKKRKVDKKYSIGLAIGTNSVGWAVITDEYKVPSKKFKVLGNTDRHSIKKNLIGALLFDSGETAEATRLKRTARRRYTRRKNRICYLQEIFSNEMAKVDDSFFHRLEESFLVEEDKKHERHPIFGNIVDEVAYHEKYPTIYHLRKKLVDSTDKADLRLIYLALAHMIKFRGHFLIEGDLNPDNSDVDKLFIQLVQTYNQLFEENPINASGVDAKAILSARLSKSRRLENLIAQLPGEKKNGLFGNLIALSLGLTPNFKSNFDLAEDAKLQLSKDTYDDDLDNLLAQIGDQYADLFLAAKNLSDAILLSDILRVNTEITKAPLSASMVKRYDEHHQDLTLLKALVRQQLPEKYKEIFFDQSKNGYAGYIDGGASQEEFYKFIKPILEKMDGTEELLVKLNREDLLRKQRTFDNGIIPHQIHLGELHAILRRQGDFYPFLKDNREKIEKILTFRIPYYVGPLARGNSRFAWMTRKSEETITPWNFEEVVDKGASAQSFIERMTNFDKNLPNEKVLPKHSLLYEYFTVYNELTKVKYVTEGMRKPAFLSGEQKKAIVDLLFKTNRKVTVKQLKEDYFKKIECFDSVEISGVEDRFNASLGTYHDLLKIIKDKDFLDNEENEDILEDIVLTLTLFEDREMIEERLKTYAHLFDDKVMKQLKRLRYTGWGRLSRKLINGIRDKQSGKTILDFLKSDGFANRNFMQLIHDDSLTFKEDIQKAQVSGQGDSLHEHIANLAGSPAIKKGILQTVKVVDELVKVMGGHKPENIVIEMARENQTTQKGQKNSRERMKRIEEGIKELGSQILKEHPVENTQLQNEKLYLYYLQNGRDMYVDQELDINRLSDYDVDHIVPQSFLKDDSIDNKVLTRSDKNRGKSDNVPSEEVVKKMKNYWRQLLNAKLITQRKFDNLTKAERGGLSELDKAGFIKRQLVETRQITKHVAQILDSRMNTKYDENDKLIREVKVITLKSKLVSDFRKDFQFYKVREINNYHHAHDAYLNAVVGTALIKKYPKLESEFVYGDYKVYDVRKMIAKSEQEIGKATAKYFFYSNIMNFFKTEITLANGEIRKRPLIETNGETGEIVWDKGRDFATVRKVLSMPQVNIVKKTEVQTGGFSKESILPKGNSDKLIARKKDWDPKKYGGFMQPTVAYSVLVVAKVEKGKSKKLKSVKELLGITIMERSSFEKNPIDFLEAKGYKEVKKDLIIKLPKYSLFELENGRKRMLASAKFLQKGNELALPSKYVNFLYLASHYEKLKGGSSGSETPGTSESATPESSGSEVEFSHEYWMRHALTLAKRARDEREVPVGAVLVLNNRVIGEGWNRAIGLHDPTAHAEIMALRQGGLVMQNYRLYDATLYSTFEPCVMCAGAMIHSRIGRVVFGVRNAKTGAAGSLMDVLHHPGMNHRVEITEGILADECAALLCRFFRMPRRVFNAQKKAQSSTDSPEDNEQKQLFVEQHKHYLDEIIEQISEFSKRVILADANLDKVLSAYNKHRDKPIREQAENIIHLFTLTNLGAPRAFKYFDTTIARKEYRSTKEVLDATLIHQSITGLYETRIDLSQLGGDEGADKRTADGSEFESPKKKRKV

SEQ ID NO: 432 - protein, 1606 aa, synthetic construct
MKRTADGSEFESPKKKRKVSEVEFSHEYWMRHALTLAKRARDEREVPVGAVLVLNNRVIGEGWNRAIGLHDPTAHAEIMALRQGGLVMQNYRLYDATLYSTFEPCVMCAGAMIHSRIGRVVFGVRNAKTGAAGSLMDVLHHPGMNHRVEITEGILADECAALLCRFFRMPRRVFNAQKKAQSSTDSGGSSGGSSGSETPGTSESATPESSGGSSGGSDKKYSIGLAIGTNSVGWAVITDEYKVPSKKFKVLGNTDRHSIKKNLIGALLFDSGETAEATRLKRTARRRYTRRKNRICYLQEIFSNEMAKVDDSFFHRLEESFLVEEDKKHERHPIFGNIVDEVAYHEKYPTIYHLRKKLVDSTDKADLRLIYLALAHMIKFRGHFLIEGDLNPDNSDVDKLFIQLVQTYNQLFEENPINASGVDAKAILSARLSKSRRLENLIAQLPGEKKNGLFGNLIALSLGLTPNFKSNFDLAEDAKLQLSKDTYDDDLDNLLAQIGDQYADLFLAAKNLSDAILLSDILRVNTEITKAPLSASMVKRYDEHHQDLTLLKALVRQQLPEKYKEIFFDQSKNGYAGYIDGGASQEEFYKFIKPILEKMDGTEELLVKLNREDLLRKQRTFDNGIIPHQIHLGELHAILRRQGDFYPFLKDNREKIEKILTFRIPYYVGPLARGNSRFAWMTRKSEETITPWNFEEVVDKGASAQSFIERMTNFDKNLPNEKVLPKHSLLYEYFTVYNELTKVKYVTEGMRKPAFLSGEQKKAIVDLLFKTNRKVTVKQLKEDYFKKIECFDSVEISGVEDRFNASLGTYHDLLKIIKDKDFLDNEENEDILEDIVLTLTLFEDREMIEERLKTYAHLFDDKVMKQLKRLRYTGWGRLSRKLINGIRDKQSGKTILDFLKSDGFANRNFMQLIHDDSLTFKEDIQKAQVSGQGDSLHEHIANLAGSPAIKKGILQTVKVVDELVKVMGGHKPENIVIEMARENQTTQKGQKNSRERMKRIEEGIKELGSQILKEHPVENTQLQNEKLYLYYLQNGRDMYVDQELDINRLSDYDVDHIVPQSFLKDDSIDNKVLTRSDKNRGKSDNVPSEEVVKKMKNYWRQLLNAKLITQRKFDNLTKAERGGLSELDKAGFIKRQLVETRQITKHVAQILDSRMNTKYDENDKLIREVKVITLKSKLVSDFRKDFQFYKVREINNYHHAHDAYLNAVVGTALIKKYPKLESEFVYGDYKVYDVRKMIAKSEQEIGKATAKYFFYSNIMNFFKTEITLANGEIRKRPLIETNGETGEIVWDKGRDFATVRKVLSMPQVNIVKKTEVQTGGFSKESILPKGNSDKLIARKKDWDPKKYGGFMQPTVAYSVLVVAKVEKGKSKKLKSVKELLGITIMERSSFEKNPIDFLEAKGYKEVKKDLIIKLPKYSLFELENGRKRMLASAKFLQKGNELALPSKYVNFLYLASHYEKLKGSPEDNEQKQLFVEQHKHYLDEIIEQISEFSKRVILADANLDKVLSAYNKHRDKPIREQAENIIHLFTLTNLGAPRAFKYFDTTIARKEYRSTKEVLDATLIHQSITGLYETRIDLSQLGGDEGADKRTADGSEFESPKKKRKV

SEQ ID NO: 433 - protein, 1594 aa, synthetic construct
MKRTADGSEFESPKKKRKVDKKYSIGLAIGTNSVGWAVITDEYKVPSKKFKVLGNTDRHSIKKNLIGALLFDSGETAEATRLKRTARRRYTRRKNRICYLQEIFSNEMAKVDDSFFHRLEESFLVEEDKKHERHPIFGNIVDEVAYHEKYPTIYHLRKKLVDSTDKADLRLIYLALAHMIKFRGHFLIEGDLNPDNSDVDKLFIQLVQTYNQLFEENPINASGVDAKAILSARLSKSRRLENLIAQLPGEKKNGLFGNLIALSLGLTPNFKSNFDLAEDAKLQLSKDTYDDDLDNLLAQIGDQYADLFLAAKNLSDAILLSDILRVNTEITKAPLSASMIKRYDEHHQDLTLLKALVRQQLPEKYKEIFFDQSKNGYAGYIDGGASQEEFYKFIKPILEKMDGTEELLVKLNREDLLRKQRTFDNGSIPHQIHLGELHAILRRQEDFYPFLKDNREKIEKILTFRIPYYVGPLARGNSRFAWMTRKSEETITPWNFEEVVDKGASAQSFIERMTNFDKNLPNEKVLPKHSLLYEYFTVYNELTKVKYVTEGMRKPAFLSGEQKKAIVDLLFKTNRKVTVKQLKEDYFKKIECFDSVEISGVEDRFNASLGTYHDLLKIIKDKDFLDNEENEDILEDIVLTLTLFEDREMIEERLKTYAHLFDDKVMKQLKRRRYTGWGRLSRKLINGIRDKQSGKTILDFLKSDGFANRNFMQLIHDDSLTFKEDIQKAQVSGQGDSLHEHIANLAGSPAIKKGILQTVKVVDELVKVMGRHKPENIVIEMARENQTTQKGQKNSRERMKRIEEGIKELGSQILKEHPVENTQLQNEKLYLYYLQNGRDMYVDQELDINRLSDYDVDHIVPQSFLKDDSIDNKVLTRSDKNRGKSDNVPSEEVVKKMKNYWRQLLNAKLITQRKFDNLTKAERGGLSELDKAGFIKRQLVETRQITKHVAQILDSRMNTKYDENDKLIREVKVITLKSKLVSDFRKDFQFYKVREINNYHHAHDAYLNAVVGTALIKKYPKLESEFVYGDYKVYDVRKMIAKSEQEIGKATAKYFFYSNIMNFFKTEITLANGEIRKRPLIETNGETGEIVWDKGRDFATVRKVLSMPQVNIVKKTEVQTGGFSKESILPKRNSDKLIARKKDWDPKKYGGFDSPTVAYSVLVVAKVEKGKSKKLKSVKELLGITIMERSSFEKNPIDFLEAKGYKEVKKDLIIKLPKYSLFELENGRKRMLASAGELQKGNELALPSKYVNFLYLASHYEKLKGGSSGSETPGTSESATPESSGSEVEFSHEYWMRHALTLAKRARDEREVPVGAVLVLNNRVIGEGWNRAIGLHDPTAHAEIMALRQGGLVMQNYRLYDATLYSTFEPCVMCAGAMIHSRIGRVVFGVRNAKTGAAGSLMDVLHHPGMNHRVEITEGILADECAALLCRFFRMPRRVFNAQKKAQSSTDSPEDNEQKQLFVEQHKHYLDEIIEQISEFSKRVILADANLDKVLSAYNKHRDKPIREQAENIIHLFTLTNLGAPAAFKYFDTTIDRKRYTSTKEVLDATLIHQSITGLYETRIDLSQLGGDEGADKRTADGSEFESPKKKRKV

SEQ ID NO: 434 - protein, 1588 aa, synthetic construct; identical to SEQ ID NO: 339

SEQ ID NO: 435 - protein, 1273 aa, synthetic construct
MSEVEFSHEYWMRHALTLAKRARDEREVPVGAVLVLNNRVIGEGWNRAIGLHDPTAHAEIMALRQGGLVMQNYRLYDATLYSTFEPCVMCAGAMIHSRIGRVVFGVRNAKTGAAGSLMDVLHHPGMNHRVEITEGILADECAALLCRFFRMPRRVFNAQKKAQSSTDSGGSSGGSSGSETPGTSESATPESSGGSSGGSKRNYILGLAIGITSVGYGIIDYETRDVIDAGVRLFKEANVENNEGRRSKRGARRLKRRRRHRIQRVKKLLFDYNLLTDHSELSGINPYEARVKGLSQKLSEEEFSAALLHLAKRRGVHNVNEVEEDTGNELSTKEQISRNSKALEEKYVAELQLERLKKDGEVRGSINRFKTSDYVKEAKQLLKVQKAYHQLDQSFIDTYIDLLETRRTYYEGPGEGSPFGWKDIKEWYEMLMGHCTYFPEELRSVKYAYNADLYNALNDLNNLVITRDENEKLEYYEKFQIIENVFKQKKKPTLKQIAKEILVNEEDIKGYRVTSTGKPEFTNLKVYHDIKDITARKEIIENAELLDQIAKILTIYQSSEDIQEELTNLNSELTQEEIEQISNLKGYTGTHNLSLKAINLILDELWHTNDNQIAIFNRLKLVPKKVDLSQQKEIPTTLVDDFILSPVVKRSFIQSIKVINAIIKKYGLPNDIIIELAREKNSKDAQKMINEMQKRNRQTNERIEEIIRTTGKENAKYLIEKIKLHDMQEGKCLYSLEAIPLEDLLNNPFNYEVDHIIPRSVSFDNSFNNKVLVKQEENSKKGNRTPFQYLSSSDSKISYETFKKHILNLAKGKGRISKTKKEYLLEERDINRFSVQKDFINRNLVDTRYATRGLMNLLRSYFRVNNLDVKVKSINGGFTSFLRRKWKFKKERNKGYKHHAEDALIIANADFIFKEWKKLDKAKKVMENQMFEEKQAESMPEIETEQEYKEIFITPHQIKHIKDFKDYKYSHRVDKKPNRELINDTLYSTRKDDKGNTLIVNNLNGLYDKDNDKLKKLINKSPEKLLMYHHDPQTYQKLKLIMEQYGDEKNPLYKYYEETGNYLTKYSKKDNGPVIKKIKYYGNKLNAHLDITDDYPNSRNKVVKLSLKPYRFDVYLDNGVYKFVTVKNLDVIKKENYYEVNSKCYEEAKKLKKISNQAEFIASFYNNDLIKINGELYRVIGVNNDLLNRIEVNMIDITYREYLENMNDKRPPRIIKTIASKTQSIKKYSTDILGNLYEVKSKKHPQIIKKGEGADKRTADGSEFESPKKKRKV

SEQ ID NO: 436 - protein, 1306 aa, synthetic construct
MSEVEFSHEYWMRHALTLAKRARDEREVPVGAVLVLNNRVIGEGWNRAIGLHDPTAHAEIMALRQGGLVMQNYRLYDATLYSTFEPCVMCAGAMIHSRIGRVVFGVRNAKTGAAGSLMDVLHHPGMNHRVEITEGILADECAALLCRFFRMPRRVFNAQKKAQSSTDSGGSSGGSSGSETPGTSESATPESSGGSSGGSKRNYILGLAIGITSVGYGIIDYETRDVIDAGVRLFKEANVENNEGRRSKRGARRLKRRRRHRIQRVKKLLFDYNLLTDHSELSGINPYEARVKGLSQKLSEEEFSAALLHLAKRRGVHNVNEVEEDTGNELSTKEQISRNSKALEEKYVAELQLERLKKDGEVRGSINRFKTSDYVKEAKQLLKVQKAYHQLDQSFIDTYIDLLETRRTYYEGPGEGSPFGWKDIKEWYEMLMGHCTYFPEELRSVKYAYNADLYNALNDLNNLVITRDENEKLEYYEKFQIIENVFKQKKKPTLKQIAKEILVNEEDIKGYRVTSTGKPEFTNLKVYHDIKDITARKEIIENAELLDQIAKILTIYQSSEDIQEELTNLNSELTQEEIEQISNLKGYTGTHNLSLKAINLILDELWHTNDNQIAIFNRLKLVPKKVDLSQQKEIPTTLVDDFILSPVVKRSFIQSIKVINAIIKKYGLPNDIIIELAREKNSKDAQKMINEMQKRNRQTNERIEEIIRTTGKENAKYLIEKIKLHDMQEGKCLYSLEAIPLEDLLNNPFNYEVDHIIPRSVSFDNSFNNKVLVKQEENSKKGNRTPFQYLSSSDSKISYETFKKHILNLAKGKGRISKTKKEYLLEERDINRFSVQKDFINRNLVDTRYATRGLMNLLRSYFRVNNLDVKVKSINGGFTSFLRRKWKFKKERNKGYKHHAEDALIIANADFIFKEWKKLDKAKKVMENQMFEEKQAESMPEIETEQEYKEIFITPHQIKHIKDFKDYKYSHRVDKKPNRKLINDTLYSTRKDDKGNTLIVNNLNGLYDKDNDKLKKLINKSPEKLLMYHHDPQTYQKLKLIMEQYGDEKNPLYKYYEETGNYLTKYSKKDNGPVIKKIKYYGNKLNAHLDITDDYPNSRNKVVKLSLKPYRFDVYLDNGVYKFVTVKNLDVIKKENYYEVNSKCYEEAKKLKKISNQAEFIASFYKNDLIKINGELYRVIGVNNDLLNRIEVNMIDITYREYLENMNDKRPPHIIKTIASKTQSIKKYSTDILGNLYEVKSKKHPQIIKKGGSPKKKRKVSSDYKDHDGDYKDHDIDYKDDDDKEGADKRTADGSEFESPKKKRKV

SEQ ID NO: 437 - protein, 1588 aa, synthetic construct
MSEVEFSHEYWMRHALTLAKRARDEREVPVGAVLVLNNRVIGEGWNRAIGLHDPTAHAEIMALRQGGLVMQNYRLYDATLYSTFEPCVMCAGAMIHSRIGRVVFGVRNAKTGAAGSLMDVLHHPGMNHRVEITEGILADECAALLCRFFRMPRRVFNAQKKAQSSTDSGGSSGGSSGSETPGTSESATPESSGGSSGGSDKKYSIGLAIGTNSVGWAVITDEYKVPSKKFKVLGNTDRHSIKKNLIGALLFDSGETAEATRLKRTARRRYTRRKNRICYLQEIFSNEMAKVDDSFFHRLEESFLVEEDKKHERHPIFGNIVDEVAYHEKYPTIYHLRKKLVDSTDKADLRLIYLALAHMIKFRGHFLIEGDLNPDNSDVDKLFIQLVQTYNQLFEENPINASGVDAKAILSARLSKSRRLENLIAQLPGEKKNGLFGNLIALSLGLTPNFKSNFDLAEDAKLQLSKDTYDDDLDNLLAQIGDQYADLFLAAKNLSDAILLSDILRVNTEITKAPLSASMVKRYDEHHQDLTLLKALVRQQLPEKYKEIFFDQSKNGYAGYIDGGASQEEFYKFIKPILEKMDGTEELLVKLNREDLLRKQRTFDNGIIPHQIHLGELHAILRRQGDFYPFLKDNREKIEKILTFRIPYYVGPLARGNSRFAWMTRKSEETITPWNFEEVVDKGASAQSFIERMTNFDKNLPNEKVLPKHSLLYEYFTVYNELTKVKYVTEGMRKPAFLSGEQKKAIVDLLFKTNRKVTVKQLKEDYFKKIECFDSVEISGVEDRFNASLGTYHDLLKIIKDKDFLDNEENEDILEDIVLTLTLFEDREMIEERLKTYAHLFDDKVMKQLKRLRYTGWGRLSRKLINGIRDKQSGKTILDFLKSDGFANRNFMQLIHDDSLTFKEDIQKAQVSGQGDSLHEHIANLAGSPAIKKGILQTVKVVDELVKVMGGHKPENIVIEMARENQTTQKGQKNSRERMKRIEEGIKELGSQILKEHPVENTQLQNEKLYLYYLQNGRDMYVDQELDINRLSDYDVDHIVPQSFLKDDSIDNKVLTRSDKNRGKSDNVPSEEVVKKMKNYWRQLLNAKLITQRKFDNLTKAERGGLSELDKAGFIKRQLVETRQITKHVAQILDSRMNTKYDENDKLIREVKVITLKSKLVSDFRKDFQFYKVREINNYHHAHDAYLNAVVGTALIKKYPKLESEFVYGDYKVYDVRKMIAKSEQEIGKATAKYFFYSNIMNFFKTEITLANGEIRKRPLIETNGETGEIVWDKGRDFATVRKVLSMPQVNIVKKTEVQTGGFSKESILPKGNSDKLIARKKDWDPKKYGGFNSPTVAYSVLVVAKVEKGKSKKLKSVKELLGITIMERSSFEKNPIDFLEAKGYKEVKKDLIIKLPKYSLFELENGRKRMLASAGVLQKGNELALPSKYVNFLYLASHYEKLKGSPEDNEQKQLFVEQHKHYLDEIIEQISEFSKRVILADANLDKVLSAYNKHRDKPIREQAENIIHLFTLTNLGAPAAFKYFDTTINRKQYNTTKEVLDATLIRQSITGLYETRIDLSQLGGDEGADKRTADGSEFESPKKKRKV

SEQ ID NO: 438 - protein, 1861 aa, synthetic construct
MKRTADGSEFESPKKKRKVTSEKGPSTGDPTLRRRIESWEFDVFYDPRELRKETCLLYEIKWGMSRKIWRSSGKNTTNHVEVNFIKKFTSERRFHSSISCSITWFLSWSPCWECSQAIREFLSQHPGVTLVIYVARLFWHMDQRNRQGLRDLVNSGVTIQIMRASEYYHCWRNFVNYPPGDEAHWPQYPPLWMMLYALELHCIILSLPPCLKISRRWQNHLAFFRLHLQNCHYQTIPPHILLATGLIHPSVTWRSGGSSGGSSGSETPGTSESATPESSGGSSGGSDKKYSIGLAIGTNSVGWAVITDEYKVPSKKFKVLGNTDRHSIKKNLIGALLFDSGETAEATRLKRTARRRYTRRKNRICYLQEIFSNEMAKVDDSFFHRLEESFLVEEDKKHERHPIFGNIVDEVAYHEKYPTIYHLRKKLVDSTDKADLRLIYLALAHMIKFRGHFLIEGDLNPDNSDVDKLFIQLVQTYNQLFEENPINASGVDAKAILSARLSKSRRLENLIAQLPGEKKNGLFGNLIALSLGLTPNFKSNFDLAEDAKLQLSKDTYDDDLDNLLAQIGDQYADLFLAAKNLSDAILLSDILRVNTEITKAPLSASMIKRYDEHHQDLTLLKALVRQQLPEKYKEIFFDQSKNGYAGYIDGGASQEEFYKFIKPILEKMDGTEELLVKLNREDLLRKQRTFDNGSIPHQIHLGELHAILRRQEDFYPFLKDNREKIEKILTFRIPYYVGPLARGNSRFAWMTRKSEETITPWNFEEVVDKGASAQSFIERMTNFDKNLPNEKVLPKHSLLYEYFTVYNELTKVKYVTEGMRKPAFLSGEQKKAIVDLLFKTNRKVTVKQLKEDYFKKIECFDSVEISGVEDRFNASLGTYHDLLKIIKDKDFLDNEENEDILEDIVLTLTLFEDREMIEERLKTYAHLFDDKVMKQLKRRRYTGWGRLSRKLINGIRDKQSGKTILDFLKSDGFANRNFMQLIHDDSLTFKEDIQKAQVSGQGDSLHEHIANLAGSPAIKKGILQTVKVVDELVKVMGRHKPENIVIEMARENQTTQKGQKNSRERMKRIEEGIKELGSQILKEHPVENTQLQNEKLYLYYLQNGRDMYVDQELDINRLSDYDVDHIVPQSFLKDDSIDNKVLTRSDKNRGKSDNVPSEEVVKKMKNYWRQLLNAKLITQRKFDNLTKAERGGLSELDKAGFIKRQLVETRQITKHVAQILDSRMNTKYDENDKLIREVKVITLKSKLVSDFRKDFQFYKVREINNYHHAHDAYLNAVVGTALIKKYPKLESEFVYGDYKVYDVRKMIAKSEQEIGKATAKYFFYSNIMNFFKTEITLANGEIRKRPLIETNGETGEIVWDKGRDFATVRKVLSMPQVNIVKKTEVQTGGFSKESIRPKRNSDKLIARKKDWDPKKYGGFVSPTVAYSVLVVAKVEKGKSKKLKSVKELLGITIMERSSFEKNPIDFLEAKGYKEVKKDLIIKLPKYSLFELENGRKRMLASARFLQKGNELALPSKYVNFLYLASHYEKLKGSPEDNEQKQLFVEQHKHYLDEIIEQISEFSKRVILADANLDKVLSAYNKHRDKPIREQAENIIHLFTLTNLGAPRAFKYFDTTIDRKAYRSTKEVLDATLIHQSITGLYETRIDLSQLGGDSGGSGGSGGSTNLSDIIEKETGKQLVIQESILMLPEEVEEVIGNKPESDILVHTAYDESTDENVMLLTSDAPEYKPWALVIQDSNGENKIKMLSGGSGGSGGSTNLSDIIEKETGKQLVIQESILMLPEEVEEVIGNKPESDILVHTAYDESTDENVMLLTSDAPEYKPWALVIQDSNGENKIKMLSGGSKRTADGSEFESPKKKRKV

SEQ ID NO: 439 - protein, 1843 aa, synthetic construct
MTSEKGPSTGDPTLRRRIESWEFDVFYDPRELRKETCLLYEIKWGMSRKIWRSSGKNTTNHVEVNFIKKFTSERRFHSSISCSITWFLSWSPCWECSQAIREFLSQHPGVTLVIYVARLFWHMDQRNRQGLRDLVNSGVTIQIMRASEYYHCWRNFVNYPPGDEAHWPQYPPLWMMLYALELHCIILSLPPCLKISRRWQNHLAFFRLHLQNCHYQTIPPHILLATGLIHPSVTWRSGGSSGGSSGSETPGTSESATPESSGGSSGGSDKKYSIGLAIGTNSVGWAVITDEYKVPSKKFKVLGNTDRHSIKKNLIGALLFDSGETAEATRLKRTARRRYTRRKNRICYLQEIFSNEMAKVDDSFFHRLEESFLVEEDKKHERHPIFGNIVDEVAYHEKYPTIYHLRKKLVDSTDKADLRLIYLALAHMIKFRGHFLIEGDLNPDNSDVDKLFIQLVQTYNQLFEENPINASGVDAKAILSARLSKSRRLENLIAQLPGEKKNGLFGNLIALSLGLTPNFKSNFDLAEDAKLQLSKDTYDDDLDNLLAQIGDQYADLFLAAKNLSDAILLSDILRVNTEITKAPLSASMIKRYDEHHQDLTLLKALVRQQLPEKYKEIFFDQSKNGYAGYIDGGASQEEFYKFIKPILEKMDGTEELLVKLNREDLLRKQRTFDNGSIPHQIHLGELHAILRRQEDFYPFLKDNREKIEKILTFRIPYYVGPLARGNSRFAWMTRKSEETITPWNFEEVVDKGASAQSFIERMTNFDKNLPNEKVLPKHSLLYEYFTVYNELTKVKYVTEGMRKPAFLSGEQKKAIVDLLFKTNRKVTVKQLKEDYFKKIECFDSVEISGVEDRFNASLGTYHDLLKIIKDKDFLDNEENEDILEDIVLTLTLFEDREMIEERLKTYAHLFDDKVMKQLKRRRYTGWGRLSRKLINGIRDKQSGKTILDFLKSDGFANRNFMQLIHDDSLTFKEDIQKAQVSGQGDSLHEHIANLAGSPAIKKGILQTVKVVDELVKVMGRHKPENIVIEMARENQTTQKGQKNSRERMKRIEEGIKELGSQILKEHPVENTQLQNEKLYLYYLQNGRDMYVDQELDINRLSDYDVDHIVPQSFLKDDSIDNKVLTRSDKNRGKSDNVPSEEVVKKMKNYWRQLLNAKLITQRKFDNLTKAERGGLSELDKAGFIKRQLVETRQITKHVAQILDSRMNTKYDENDKLIREVKVITLKSKLVSDFRKDFQFYKVREINNYHHAHDAYLNAVVGTALIKKYPKLESEFVYGDYKVYDVRKMIAKSEQEIGKATAKYFFYSNIMNFFKTEITLANGEIRKRPLIETNGETGEIVWDKGRDFATVRKVLSMPQVNIVKKTEVQTGGFSKESILPKRNSDKLIARKKDWDPKKYGGFVSPTVAYSVLVVAKVEKGKSKKLKSVKELLGITIMERSSFEKNPIDFLEAKGYKEVKKDLIIKLPKYSLFELENGRKRMLASARELQKGNELALPSKYVNFLYLASHYEKLKGSPEDNEQKQLFVEQHKHYLDEIIEQISEFSKRVILADANLDKVLSAYNKHRDKPIREQAENIIHLFTLTNLGAPAAFKYFDTTIDRKQYRSTKEVLDATLIHQSITGLYETRIDLSQLGGDSGGSGGSGGSTNLSDIIEKETGKQLVIQESILMLPEEVEEVIGNKPESDILVHTAYDESTDENVMLLTSDAPEYKPWALVIQDSNGENKIKMLSGGSGGSGGSTNLSDIIEKETGKQLVIQESILMLPEEVEEVIGNKPESDILVHTAYDESTDENVMLLTSDAPEYKPWALVIQDSNGENKIKMLSGGSKRTADGSEFESPKKKRKV

SEQ ID NO: 440 - protein, 1861 aa, synthetic construct
MKRTADGSEFESPKKKRKVTSEKGPSTGDPTLRRRIESWEFDVFYDPRELRKETCLLYEIKWGMSRKIWRSSGKNTTNHVEVNFIKKFTSERRFHSSISCSITWFLSWSPCWECSQAIREFLSQHPGVTLVIYVARLFWHMDQRNRQGLRDLVNSGVTIQIMRASEYYHCWRNFVNYPPGDEAHWPQYPPLWMMLYALELHCIILSLPPCLKISRRWQNHLAFFRLHLQNCHYQTIPPHILLATGLIHPSVTWRSGGSSGGSSGSETPGTSESATPESSGGSSGGSDKKYSIGLAIGTNSVGWAVITDEYKVPSKKFKVLGNTDRHSIKKNLIGALLFDSGETAEATRLKRTARRRYTRRKNRICYLQEIFSNEMAKVDDSFFHRLEESFLVEEDKKHERHPIFGNIVDEVAYHEKYPTIYHLRKKLVDSTDKADLRLIYLALAHMIKFRGHFLIEGDLNPDNSDVDKLFIQLVQTYNQLFEENPINASGVDAKAILSARLSKSRRLENLIAQLPGEKKNGLFGNLIALSLGLTPNFKSNFDLAEDAKLQLSKDTYDDDLDNLLAQIGDQYADLFLAAKNLSDAILLSDILRVNTEITKAPLSASMVKRYDEHHQDLTLLKALVRQQLPEKYKEIFFDQSKNGYAGYIDGGASQEEFYKFIKPILEKMDGTEELLVKLNREDLLRKQRTFDNGIIPHQIHLGELHAILRRQGDFYPFLKDNREKIEKILTFRIPYYVGPLARGNSRFAWMTRKSEETITPWNFEEVVDKGASAQSFIERMTNFDKNLPNEKVLPKHSLLYEYFTVYNELTKVKYVTEGMRKPAFLSGEQKKAIVDLLFKTNRKVTVKQLKEDYFKKIECFDSVEISGVEDRFNASLGTYHDLLKIIKDKDFLDNEENEDILEDIVLTLTLFEDREMIEERLKTYAHLFDDKVMKQLKRLRYTGWGRLSRKLINGIRDKQSGKTILDFLKSDGFANRNFMQLIHDDSLTFKEDIQKAQVSGQGDSLHEHIANLAGSPAIKKGILQTVKVVDELVKVMGGHKPENIVIEMARENQTTQKGQKNSRERMKRIEEGIKELGSQILKEHPVENTQLQNEKLYLYYLQNGRDMYVDQELDINRLSDYDVDHIVPQSFLKDDSIDNKVLTRSDKNRGKSDNVPSEEVVKKMKNYWRQLLNAKLITQRKFDNLTKAERGGLSELDKAGFIKRQLVETRQITKHVAQILDSRMNTKYDENDKLIREVKVITLKSKLVSDFRKDFQFYKVREINNYHHAHDAYLNAVVGTALIKKYPKLESEFVYGDYKVYDVRKMIAKSEQEIGKATAKYFFYSNIMNFFKTEITLANGEIRKRPLIETNGETGEIVWDKGRDFATVRKVLSMPQVNIVKKTEVQTGGFSKESILPKGNSDKLIARKKDWDPKKYGGFMQPTVAYSVLVVAKVEKGKSKKLKSVKELLGITIMERSSFEKNPIDFLEAKGYKEVKKDLIIKLPKYSLFELENGRKRMLASAKFLQKGNELALPSKYVNFLYLASHYEKLKGSPEDNEQKQLFVEQHKHYLDEIIEQISEFSKRVILADANLDKVLSAYNKHRDKPIREQAENIIHLFTLTNLGAPRAFKYFDTTIARKEYRSTKEVLDATLIHQSITGLYETRIDLSQLGGDSGGSGGSGGSTNLSDIIEKETGKQLVIQESILMLPEEVEEVIGNKPESDILVHTAYDESTDENVMLLTSDAPEYKPWALVIQDSNGENKIKMLSGGSGGSGGSTNLSDIIEKETGKQLVIQESILMLPEEVEEVIGNKPESDILVHTAYDESTDENVMLLTSDAPEYKPWALVIQDSNGENKIKMLSGGSKRTADGSEFESPKKKRKV

SEQ ID NO: 441 - protein, 1843 aa, synthetic construct
MTSEKGPSTGDPTLRRRIESWEFDVFYDPRELRKETCLLYEIKWGMSRKIWRSSGKNTTNHVEVNFIKKFTSERRFHSSISCSITWFLSWSPCWECSQAIREFLSQHPGVTLVIYVARLFWHMDQRNRQGLRDLVNSGVTIQIMRASEYYHCWRNFVNYPPGDEAHWPQYPPLWMMLYALELHCIILSLPPCLKISRRWQNHLAFFRLHLQNCHYQTIPPHILLATGLIHPSVTWRSGGSSGGSSGSETPGTSESATPESSGGSSGGSDKKYSIGLAIGTNSVGWAVITDEYKVPSKKFKVLGNTDRHSIKKNLIGALLFDSGETAEATRLKRTARRRYTRRKNRICYLQEIFSNEMAKVDDSFFHRLEESFLVEEDKKHERHPIFGNIVDEVAYHEKYPTIYHLRKKLVDSTDKADLRLIYLALAHMIKFRGHFLIEGDLNPDNSDVDKLFIQLVQTYNQLFEENPINASGVDAKAILSARLSKSRRLENLIAQLPGEKKNGLFGNLIALSLGLTPNFKSNFDLAEDAKLQLSKDTYDDDLDNLLAQIGDQYADLFLAAKNLSDAILLSDILRVNTEITKAPLSASMIKRYDEHHQDLTLLKALVRQQLPEKYKEIFFDQSKNGYAGYIDGGASQEEFYKFIKPILEKMDGTEELLVKLNREDLLRKQRTFDNGSIPHQIHLGELHAILRRQEDFYPFLKDNREKIEKILTFRIPYYVGPLARGNSRFAWMTRKSEETITPWNFEEVVDKGASAQSFIERMTNFDKNLPNEKVLPKHSLLYEYFTVYNELTKVKYVTEGMRKPAFLSGEQKKAIVDLLFKTNRKVTVKQLKEDYFKKIECFDSVEISGVEDRFNASLGTYHDLLKIIKDKDFLDNEENEDILEDIVLTLTLFEDREMIEERLKTYAHLFDDKVMKQLKRRRYTGWGRLSRKLINGIRDKQSGKTILDFLKSDGFANRNFMQLIHDDSLTFKEDIQKAQVSGQGDSLHEHIANLAGSPAIKKGILQTVKVVDELVKVMGRHKPENIVIEMARENQTTQKGQKNSRERMKRIEEGIKELGSQILKEHPVENTQLQNEKLYLYYLQNGRDMYVDQELDINRLSDYDVDHIVPQSFLKDDSIDNKVLTRSDKNRGKSDNVPSEEVVKKMKNYWRQLLNAKLITQRKFDNLTKAERGGLSELDKAGFIKRQLVETRQITKHVAQILDSRMNTKYDENDKLIREVKVITLKSKLVSDFRKDFQFYKVREINNYHHAHDAYLNAVVGTALIKKYPKLESEFVYGDYKVYDVRKMIAKSEQEIGKATAKYFFYSNIMNFFKTEITLANGEIRKRPLIETNGETGEIVWDKGRDFATVRKVLSMPQVNIVKKTEVQTGGFSKESILPKRNSDKLIARKKDWDPKKYGGFDSPTVAYSVLVVAKVEKGKSKKLKSVKELLGITIMERSSFEKNPIDFLEAKGYKEVKKDLIIKLPKYSLFELENGRKRMLASAGELQKGNELALPSKYVNFLYLASHYEKLKGSPEDNEQKQLFVEQHKHYLDEIIEQISEFSKRVILADANLDKVLSAYNKHRDKPIREQAENIIHLFTLTNLGAPAAFKYFDTTIDRKRYTSTKEVLDATLIHQSITGLYETRIDLSQLGGDSGGSGGSGGSTNLSDIIEKETGKQLVIQESILMLPEEVEEVIGNKPESDILVHTAYDESTDENVMLLTSDAPEYKPWALVIQDSNGENKIKMLSGGSGGSGGSTNLSDIIEKETGKQLVIQESILMLPEEVEEVIGNKPESDILVHTAYDESTDENVMLLTSDAPEYKPWALVIQDSNGENKIKMLSGGSKRTADGSEFESPKKKRKV

SEQ ID NO: 442 - protein, 1562 aa, synthetic construct
MTSEKGPSTGDPTLRRRIESWEFDVFYDPRELRKETCLLYEIKWGMSRKIWRSSGKNTTNHVEVNFIKKFTSERRFHSSISCSITWFLSWSPCWECSQAIREFLSQHPGVTLVIYVARLFWHMDQRNRQGLRDLVNSGVTIQIMRASEYYHCWRNFVNYPPGDEAHWPQYPPLWMMLYALELHCIILSLPPCLKISRRWQNHLAFFRLHLQNCHYQTIPPHILLATGLIHPSVTWRSGGSSGGSSGSETPGTSESATPESSGGSSGGSGKRNYILGLAIGITSVGYGIIDYETRDVIDAGVRLFKEANVENNEGRRSKRGARRLKRRRRHRIQRVKKLLFDYNLLTDHSELSGINPYEARVKGLSQKLSEEEFSAALLHLAKRRGVHNVNEVEEDTGNELSTKEQISRNSKALEEKYVAELQLERLKKDGEVRGSINRFKTSDYVKEAKQLLKVQKAYHQLDQSFIDTYIDLLETRRTYYEGPGEGSPFGWKDIKEWYEMLMGHCTYFPEELRSVKYAYNADLYNALNDLNNLVITRDENEKLEYYEKFQIIENVFKQKKKPTLKQIAKEILVNEEDIKGYRVTSTGKPEFTNLKVYHDIKDITARKEIIENAELLDQIAKILTIYQSSEDIQEELTNLNSELTQEEIEQISNLKGYTGTHNLSLKAINLILDELWHTNDNQIAIFNRLKLVPKKVDLSQQKEIPTTLVDDFILSPVVKRSFIQSIKVINAIIKKYGLPNDIIIELAREKNSKDAQKMINEMQKRNRQTNERIEEIIRTTGKENAKYLIEKIKLHDMQEGKCLYSLEAIPLEDLLNNPFNYEVDHIIPRSVSFDNSFNNKVLVKQEENSKKGNRTPFQYLSSSDSKISYETFKKHILNLAKGKGRISKTKKEYLLEERDINRFSVQKDFINRNLVDTRYATRGLMNLLRSYFRVNNLDVKVKSINGGFTSFLRRKWKFKKERNKGYKHHAEDALIIANADFIFKEWKKLDKAKKVMENQMFEEKQAESMPEIETEQEYKEIFITPHQIKHIKDFKDYKYSHRVDKKPNRELINDTLYSTRKDDKGNTLIVNNLNGLYDKDNDKLKKLINKSPEKLLMYHHDPQTYQKLKLIMEQYGDEKNPLYKYYEETGNYLTKYSKKDNGPVIKKIKYYGNKLNAHLDITDDYPNSRNKVVKLSLKPYRFDVYLDNGVYKFVTVKNLDVIKKENYYEVNSKCYEEAKKLKKISNQAEFIASFYNNDLIKINGELYRVIGVNNDLLNRIEVNMIDITYREYLENMNDKRPPRIIKTIASKTQSIKKYSTDILGNLYEVKSKKHPQIIKKGGSPKKKRKVSSDYKDHDGDYKDHDIDYKDDDDKSGGSGGSGGSTNLSDIIEKETGKQLVIQESILMLPEEVEEVIGNKPESDILVHTAYDESTDENVMLLTSDAPEYKPWALVIQDSNGENKIKMLSGGSGGSGGSTNLSDIIEKETGKQLVIQESILMLPEEVEEVIGNKPESDILVHTAYDESTDENVMLLTSDAPEYKPWALVIQDSNGENKIKMLSGGSKRTADGSEFESPKKKRKV

SEQ ID NO: 443 - protein, 1562 aa, synthetic construct
MTSEKGPSTGDPTLRRRIESWEFDVFYDPRELRKETCLLYEIKWGMSRKIWRSSGKNTTNHVEVNFIKKFTSERRFHSSISCSITWFLSWSPCWECSQAIREFLSQHPGVTLVIYVARLFWHMDQRNRQGLRDLVNSGVTIQIMRASEYYHCWRNFVNYPPGDEAHWPQYPPLWMMLYALELHCIILSLPPCLKISRRWQNHLAFFRLHLQNCHYQTIPPHILLATGLIHPSVTWRSGGSSGGSSGSETPGTSESATPESSGGSSGGSGKRNYILGLAIGITSVGYGIIDYETRDVIDAGVRLFKEANVENNEGRRSKRGARRLKRRRRHRIQRVKKLLFDYNLLTDHSELSGINPYEARVKGLSQKLSEEEFSAALLHLAKRRGVHNVNEVEEDTGNELSTKEQISRNSKALEEKYVAELQLERLKKDGEVRGSINRFKTSDYVKEAKQLLKVQKAYHQLDQSFIDTYIDLLETRRTYYEGPGEGSPFGWKDIKEWYEMLMGHCTYFPEELRSVKYAYNADLYNALNDLNNLVITRDENEKLEYYEKFQIIENVFKQKKKPTLKQIAKEILVNEEDIKGYRVTSTGKPEFTNLKVYHDIKDITARKEIIENAELLDQIAKILTIYQSSEDIQEELTNLNSELTQEEIEQISNLKGYTGTHNLSLKAINLILDELWHTNDNQIAIFNRLKLVPKKVDLSQQKEIPTTLVDDFILSPVVKRSFIQSIKVINAIIKKYGLPNDIIIELAREKNSKDAQKMINEMQKRNRQTNERIEEIIRTTGKENAKYLIEKIKLHDMQEGKCLYSLEAIPLEDLLNNPFNYEVDHIIPRSVSFDNSFNNKVLVKQEENSKKGNRTPFQYLSSSDSKISYETFKKHILNLAKGKGRISKTKKEYLLEERDINRFSVQKDFINRNLVDTRYATRGLMNLLRSYFRVNNLDVKVKSINGGFTSFLRRKWKFKKERNKGYKHHAEDALIIANADFIFKEWKKLDKAKKVMENQMFEEKQAESMPEIETEQEYKEIFITPHQIKHIKDFKDYKYSHRVDKKPNRKLINDTLYSTRKDDKGNTLIVNNLNGLYDKDNDKLKKLINKSPEKLLMYHHDPQTYQKLKLIMEQYGDEKNPLYKYYEETGNYLTKYSKKDNGPVIKKIKYYGNKLNAHLDITDDYPNSRNKVVKLSLKPYRFDVYLDNGVYKFVTVKNLDVIKKENYYEVNSKCYEEAKKLKKISNQAEFIASFYKNDLIKINGELYRVIGVNNDLLNRIEVNMIDITYREYLENMNDKRPPHIIKTIASKTQSIKKYSTDILGNLYEVKSKKHPQIIKKGGSPKKKRKVSSDYKDHDGDYKDHDIDYKDDDDKSGGSGGSGGSTNLSDIIEKETGKQLVIQESILMLPEEVEEVIGNKPESDILVHTAYDESTDENVMLLTSDAPEYKPWALVIQDSNGENKIKMLSGGSGGSGGSTNLSDIIEKETGKQLVIQESILMLPEEVEEVIGNKPESDILVHTAYDESTDENVMLLTSDAPEYKPWALVIQDSNGENKIKMLSGGSKRTADGSEFESPKKKRKV

SEQ ID NO: 444 - protein, 1843 aa, synthetic construct
MTSEKGPSTGDPTLRRRIESWEFDVFYDPRELRKETCLLYEIKWGMSRKIWRSSGKNTTNHVEVNFIKKFTSERRFHSSISCSITWFLSWSPCWECSQAIREFLSQHPGVTLVIYVARLFWHMDQRNRQGLRDLVNSGVTIQIMRASEYYHCWRNFVNYPPGDEAHWPQYPPLWMMLYALELHCIILSLPPCLKISRRWQNHLAFFRLHLQNCHYQTIPPHILLATGLIHPSVTWRSGGSSGGSSGSETPGTSESATPESSGGSSGGSDKKYSIGLAIGTNSVGWAVITDEYKVPSKKFKVLGNTDRHSIKKNLIGALLFDSGETAEATRLKRTARRRYTRRKNRICYLQEIFSNEMAKVDDSFFHRLEESFLVEEDKKHERHPIFGNIVDEVAYHEKYPTIYHLRKKLVDSTDKADLRLIYLALAHMIKFRGHFLIEGDLNPDNSDVDKLFIQLVQTYNQLFEENPINASGVDAKAILSARLSKSRRLENLIAQLPGEKKNGLFGNLIALSLGLTPNFKSNFDLAEDAKLQLSKDTYDDDLDNLLAQIGDQYADLFLAAKNLSDAILLSDILRVNTEITKAPLSASMVKRYDEHHQDLTLLKALVRQQLPEKYKEIFFDQSKNGYAGYIDGGASQEEFYKFIKPILEKMDGTEELLVKLNREDLLRKQRTFDNGIIPHQIHLGELHAILRRQGDFYPFLKDNREKIEKILTFRIPYYVGPLARGNSRFAWMTRKSEETITPWNFEEVVDKGASAQSFIERMTNFDKNLPNEKVLPKHSLLYEYFTVYNELTKVKYVTEGMRKPAFLSGEQKKAIVDLLFKTNRKVTVKQLKEDYFKKIECFDSVEISGVEDRFNASLGTYHDLLKIIKDKDFLDNEENEDILEDIVLTLTLFEDREMIEERLKTYAHLFDDKVMKQLKRLRYTGWGRLSRKLINGIRDKQSGKTILDFLKSDGFANRNFMQLIHDDSLTFKEDIQKAQVSGQGDSLHEHIANLAGSPAIKKGILQTVKVVDELVKVMGGHKPENIVIEMARENQTTQKGQKNSRERMKRIEEGIKELGSQILKEHPVENTQLQNEKLYLYYLQNGRDMYVDQELDINRLSDYDVDHIVPQSFLKDDSIDNKVLTRSDKNRGKSDNVPSEEVVKKMKNYWRQLLNAKLITQRKFDNLTKAERGGLSELDKAGFIKRQLVETRQITKHVAQILDSRMNTKYDENDKLIREVKVITLKSKLVSDFRKDFQFYKVREINNYHHAHDAYLNAVVGTALIKKYPKLESEFVYGDYKVYDVRKMIAKSEQEIGKATAKYFFYSNIMNFFKTEITLANGEIRKRPLIETNGETGEIVWDKGRDFATVRKVLSMPQVNIVKKTEVQTGGFSKESILPKGNSDKLIARKKDWDPKKYGGFNSPTVAYSVLVVAKVEKGKSKKLKSVKELLGITIMERSSFEKNPIDFLEAKGYKEVKKDLIIKLPKYSLFELENGRKRMLASAGVLQKGNELALPSKYVNFLYLASHYEKLKGSPEDNEQKQLFVEQHKHYLDEIIEQISEFSKRVILADANLDKVLSAYNKHRDKPIREQAENIIHLFTLTNLGAPAAFKYFDTTINRKQYNTTKEVLDATLIRQSITGLYETRIDLSQLGGDSGGSGGSGGSTNLSDIIEKETGKQLVIQESILMLPEEVEEVIGNKPESDILVHTAYDESTDENVMLLTSDAPEYKPWALVIQDSNGENKIKMLSGGSGGSGGSTNLSDIIEKETGKQLVIQESILMLPEEVEEVIGNKPESDILVHTAYDESTDENVMLLTSDAPEYKPWALVIQDSNGENKIKMLSGGSKRTADGSEFESPKKKRKV

SEQ ID NO: 445 - RNA, 100 nt, synthetic construct
  source 1..100: mol_type = other RNA
cactggcatcagaggaccccgttttagagctagaaatagcaagttaaaataaggctagtccgttatcaacttgaaaaagtggcaccgagtcggtgctttt

SEQ ID NO: 446 - RNA, 100 nt, synthetic construct; identical to SEQ ID NO: 445
  source 1..100: mol_type = other RNA

SEQ ID NO: 447 - RNA, 100 nt, synthetic construct; identical to SEQ ID NO: 445
  source 1..100: mol_type = other RNA

SEQ ID NO: 448 - RNA, 100 nt, synthetic construct
  source 1..100: mol_type = other RNA
ggcatcagaggaccccagaagttttagagctagaaatagcaagttaaaataaggctagtccgttatcaacttgaaaaagtggcaccgagtcggtgctttt

SEQ ID NO: 449 - RNA, 100 nt, synthetic construct
  source 1..100: mol_type = other RNA
tgataccacactggcatcaggttttagagctagaaatagcaagttaaaataaggctagtccgttatcaacttgaaaaagtggcaccgagtcggtgctttt

SEQ ID NO: 450 - RNA, 100 nt, synthetic construct
  source 1..100: mol_type = other RNA
gataccacactggcatcagagttttagagctagaaatagcaagttaaaataaggctagtccgttatcaacttgaaaaagtggcaccgagtcggtgctttt

SEQ ID NO: 451 - RNA, 100 nt, synthetic construct
  source 1..100: mol_type = other RNA
gggcttttctcaggtggtgcgttttagagctagaaatagcaagttaaaataaggctagtccgttatcaacttgaaaaagtggcaccgagtcggtgctttt

SEQ ID NO: 452 - RNA, 100 nt, synthetic construct; identical to SEQ ID NO: 451
  source 1..100: mol_type = other RNA

SEQ ID NO: 453 - RNA, 100 nt, synthetic construct; identical to SEQ ID NO: 451
  source 1..100: mol_type = other RNA

SEQ ID NO: 454 - RNA, 100 nt, synthetic construct
  source 1..100: mol_type = other RNA
acagggcttttctcaggtgggttttagagctagaaatagcaagttaaaataaggctagtccgttatcaacttgaaaaagtggcaccgagtcggtgctttt

SEQ ID NO: 455 - RNA, 100 nt, synthetic construct; identical to SEQ ID NO: 454
  source 1..100: mol_type = other RNA

SEQ ID NO: 456 - RNA, 100 nt, synthetic construct; identical to SEQ ID NO: 454
  source 1..100: mol_type = other RNA

SEQ ID NO: 457 - RNA, 109 nt, synthetic construct
  source 1..109: mol_type = other RNA
agggcttttctcaggtggtgcgttttagtactctgtaatgaaaattacagaatctactaaaacaaggcaaaatgccgtgtttatctcgtcaacttgttggcgagatttt

SEQ ID NO: 458 - RNA, 100 nt, synthetic construct
  source 1..100: mol_type = other RNA
ccacagggcttttctcaggtgttttagagctagaaatagcaagttaaaataaggctagtccgttatcaacttgaaaaagtggcaccgagtcggtgctttt

SEQ ID NO: 459 - RNA, 100 nt, synthetic construct
  source 1..100: mol_type = other RNA
tggaccacagggcttttctcgttttagagctagaaatagcaagttaaaataaggctagtccgttatcaacttgaaaaagtggcaccgagtcggtgctttt

SEQ ID NO: 460 - RNA, 100 nt, synthetic construct
  source 1..100: mol_type = other RNA
accacagggcttttctcagggttttagagctagaaatagcaagttaaaataaggctagtccgttatcaacttgaaaaagtggcaccgagtcggtgctttt

SEQ ID NO: 461 - RNA, 100 nt, synthetic construct
  source 1..100: mol_type = other RNA
cactggcatcagagaaccacgttttagagctagaaatagcaagttaaaataaggctagtccgttatcaacttgaaaaagtggcaccgagtcggtgctttt

SEQ ID NO: 462 - RNA, 100 nt, synthetic construct; identical to SEQ ID NO: 461
  source 1..100: mol_type = other RNA

SEQ ID NO: 463 - protein, 1380 aa, synthetic construct
MKKPYSIGLDIGTNSVGWAVITDDYKVPAKKMKVLGNTDRSHIKKNLIGALLFDAGNTAEDRRLKRTARRRYTRRRNRILYLQEIFAEEMNKIDESFFHRLDDSFLVPEDKRGSKYPIFATLQEEKEYHKQFPTIYHLRKQLAESNEKADLRLVYLALAHMIKYRGHFLIDDPKFKVQNNDIQGLFEKFVEEYDNVQETSLSKIKLNVTEILTAKIPKSEKQEQLLKNYPSEKKNTLFGNLIGLALGLTPNFKTNFSLENDAKLQISSESYEEDLGSLLALIGENFIELFSAVKNLSDGILLAGIVSDESPHAPLSTKMVIRFKEHEEDLAALKHFIKANLPEKYDEVFSDDSKNGYAGYVGVDSKVRKRNGKLATEEEFYKYLKDILNNVKGADYFLEKIKREDLLRKQRTFDNGTIPYQVHLEEMKAILQNQGEYYPFLKENKEKIQQILTFRIPYYVGPLARGNRDFAWLTRNSDQAIRPWNFEEVVDKASSAEDFINKMTNYDLYLPEEKVLPKHSLLYETFAVYNELTKVKFIAEGLRDYQFLDSGQKKQIVNQLFKEKRKVTEKDIIHYLHNVDGYDGIELKGIEKQFNASLSTYHDLLKIIKDKEFMDDPKNEEILENIVHTLTIFEDREMIKQRLAQYDSLFDEKVIKALTRRHYTGWGKLSAKLINGICDKQTNKTILDFLIDDDKINRNFMQLINDDGLSFKDIIQKAQVVGKIDDVKQVVQELPGSPAIKKGILQSIKIVDELVKVMGHAPESIVIEMARENQTTARGKKNSQQRYKRIEDALKNLAPGLDSNILKENPTDNIQLQNDRLFLYYLQNGKDMYTGEALDINQLSNYDIDHIVPQAFIKDDSLDNRVLTSSKDNRGKSDNVPSIEVVQKRKAFWQQLLDSKLISERKFNNLTKAERGGLDERDKVGFIKRQLVETRQITKHVAQILDARFNTEVNEKNQKIRKVKIITLKSNLVSNFRKEFGLYKVREINDYHHAHDAYLNAVVAKAILKKYPKLEPEFVYGDYQKYDLKRYISRSKDPKEIEKATEKYFFYSNLLNFFKEEVHYADGTIIKRENIEYSKDTGEIAWNKEKDFATVRKVLSCPQVNIVKKTEVQTGGFSKESILPKRNSDKLIARKKDWDPKKYGGFDSPTVAYSVLVVAKVEKGKSKKLKSVKELVGITIMERSSFEKDPVDFLEAKGYKEVRKDLIIKLPKYSLFELENGRKRMLASAGELQKGNELALPSKYVNFLYLASHYEKLKGSPEDNEQKQLFVEQHKHYLDEIIEQISEFSKRVILADANLDKVLSAYNKHRDKPIREQAENIIHLFTLTNLGAPAAFKYFDTTIDRKRYTSTKEVLDATLIHQSITGLYETRIDLSQLGGD

SEQ ID NO: 464 - DNA, 4140 bp, synthetic construct
  source 1..4140: mol_type = other DNA
atgaagaagccttattccatcggcttggacatcgggactaactccgtcggatgggctgtgattaccgacgactacaaggttcccgcaaaaaagatgaaagtgctcggcaatacagatcggtcacatattaagaagaacctgattggcgctctgcttttcgatgcaggtaatactgccgaggataggcgcctcaagagaacagcccggcgtagatacactcgcagaaggaaccggattctgtacctgcaagaaatttttgctgaagaaatgaataagatcgatgagtcattcttccaccgactggacgatagtttcctggtacctgaagacaaaaggggatccaagtaccccatttttgccacactccaagaagagaaggagtaccacaagcaatttccgaccatctaccaccttaggaagcagctggcagagtccaacgaaaaggcagacttgcggttagtctacctggctcttgcacacatgataaagtaccggggacatttcttaattgacgaccctaagtttaaagttcagaataacgatattcaaggcctcttcgaaaagtttgttgaggaatatgataacgtacaagaaacctctttgtctaaaattaagctcaatgtgactgagatcctcacagcaaagattcccaaaagcgagaaacaagagcaactcctgaagaactaccctagtgagaaaaagaacaccctttttggcaatctgatcgggctcgccctgggcctgacacctaacttcaaaacaaatttctccctggagaacgacgccaagctgcaaatctcatccgagagttacgaggaagacttaggatctctcctcgcactgattggagaaaacttcattgaactcttctccgccgtgaaaaatctgagtgacggcatccttctggccggaatcgtctctgacgagagtccccacgcgccgctgagcacaaagatggtcatccggttcaaagagcacgaagaagatctcgcggcactcaaacatttcatcaaagccaacttgccagaaaaatacgatgaagtattctccgacgatagcaaaaacggctatgcgggatacgtaggagtcgacagcaaggtgcggaagcgcaatggtaagcttgctacagaagaagaattttacaagtaccttaaagatatcctcaataatgttaagggggccgactacttcctcgaaaagatcaaaagggaggacctgttgaggaaacagcgtacctttgacaacggcacaatcccgtaccaggtgcacctcgaagaaatgaaagccattctgcagaaccagggggaatactatccattcctcaaggaaaacaaggaaaaaatccagcagatccttacgtttaggattccttactatgtgggccctttggcaaggggtaaccgggatttcgcttggctcaccaggaatagtgaccaggccataaggccctggaactttgaagaagtcgtcgacaaggcctcttccgccgaagacttcattaacaaaatgactaactacgatctctacctgccagaggaaaaagtccttccaaaacatagcctgctttacgaaaccttcgccgtatacaacgagcttacaaaagtcaagttcatcgcagagggtctcagggattaccaattccttgactctggccaaaaaaagcagatcgtgaatcaacttttcaaggagaaacgaaaggtgactgaaaaggacatcattcactacctgcacaacgtcgatggatacgacgggattgaactgaagggcatagaaaagcagttcaatgctagtttgtccacgtaccacgatctgcttaaaatcattaaggataaggaattcatggatgaccctaagaacgaagagattttggaaaacatcgtccacaccctgaccattttcgaggatagggagatgataaagcaacggctggcacagtacgactcactttttgacgagaaggtgataaaagcccttacaagaaggcattataccgggtggggcaagctctccgctaagctgatcaatggtatttgcgacaagcagaccaataagactattttggacttcctgattgacgatgataagataaaccgaaactttatgcagctgattaatgatgatggactgagctttaaagatatcattcagaaggcccaggtcgtcggcaagatcgacgacgtcaaacaggtggtgcaggaacttccaggatccccggccattaagaagggaatattacagtccatcaaaattgtggatgagctggtgaaagtcatgggacatgcacctgagtctatcgtcatagagatggctcgtgaaaaccagacgacagcccgaggaaagaagaacagccaacaacggtataaacggatcgaggatgcacttaagaatctggccccggggctggattctaatatcttaaaagaaaatccaaccgataatattcaacttcagaacgaccggctttttctgtattaccttcagaatggaaaagatatgtataccggagaagccctggatataaatcagctgagtaactatgatatcgaccacattgtgcctcaggctttcattaaggatgacagcctggacaatcgcgtactcacatcctccaaggacaacagaggcaagagcgataacgtccctagcatcgaagtggtacaaaagcgtaaggccttctggcagcagctcttagactctaaattgataagcgaacggaaattcaataacctcacaaaggccgagcgtggtggcttggacgagagagacaaggtgggcttcattaaacggcagctcgtggaaaccagacagataaccaagcacgttgcccagatcctcgatgccaggttcaacaccgaagttaacgagaaaaaccaaaagattcggaaagtgaagatcatcactctcaagtctaatttggtgtccaactttagaaaagagtttggactctataaggtccgagagattaatgattatcaccacgctcacgatgcctacctcaacgcagtggtggccaaggccatcctgaaaaaatatcctaagctcgagcctgagttcgtctatggtgactatcagaagtacgacctcaagcgctatattagtaggagcaaggatcctaaagagatcgaaaaggccacagaaaagtacttcttttacagcaacttactcaacttcttcaaagaagaagtccactacgctgatggcaccatcatcaagcgagaaaatatagagtacagtaaggacacaggcgaaatcgcctggaataaagagaaggatttcgctactgtgcgaaaagttctgtcttgcccccaggtgaacattgtgaaaaagactgaggtgcagactggcgggtttagcaaagagagtatcctgccaaagcggaatagcgataagttaattgctcggaaaaaggactgggatccaaagaagtacggcggcttcgattccccaaccgttgcctacagcgtcctcgtcgtcgccaaggtggagaagggtaaaagcaagaagctgaaaagtgtaaaggaactggtcggcattaccattatggagcggagttccttcgaaaaggatccagttgattttttagaagccaaggggtataaggaggtgcgcaaggatttaattattaaactccccaagtacagcctgtttgagctggagaacggaaggaagaggatgctggctagcgccggcgagctccaaaagggcaatgagctcgccctgccaagcaagtacgtgaactttctctatctggctagccactacgagaagctgaagggatcacctgaagacaatgagcagaaacagctgttcgtcgagcagcataaacactacctcgacgaaattattgagcaaattagtgagttctcaaagcgggtaatcctcgcagatgcaaatctggataaagtgttaagcgcgtataataagcaccgggacaaaccaatccgggagcaagccgagaacatcattcatctcttcacactgaccaatcttggggctcctgcagcttttaaatatttcgatacaaccatcgacaggaagcgatatacttctacaaaggaagtgcttgatgcaactctcatccatcaaagcatcacggggctgtatgaaacccggattgacctgagtcagctgggtggggac

SEQ ID NO: 465 - RNA, 86 nt, synthetic construct
  source 1..86: mol_type = other RNA
gttttagagctgtgttgaaaaacacagcaagttaaaataaggctttgtccgtatccaacttgaaaaagtgagcaccgattcggtgc

SEQ ID NO: 466 - RNA, 78 nt, synthetic construct
  source 1..78: mol_type = other RNA
gttttagagctggaaacagcaagttaaaataaggctttgtccgtatccaacttgaaaaagtgagcaccgattcggtgc

SEQ ID NO: 467 - RNA, 76 nt, synthetic construct; identical to SEQ ID NO: 319
  source 1..76: mol_type = other RNA

SEQ ID NO: 468 - protein, 12 aa, synthetic construct
EGGSEEEEESGS

SEQ ID NO: 469 - protein, 12 aa, synthetic construct
KGPKPKKEESEK

SEQ ID NO: 470 - protein, 166 aa, synthetic construct
SEVEFSHEYWMRHALTLAKRARDEREVPVGAVLVLNNRVIGEGWNRAIGLHDPTAHAEIMALRQGGLVMQNYRLIDATLYVTFEPCVMCAGAMIHSRIGRVVFGVRNSKRGAAGSLMNVLNYPGMNHRVEITEGILADECAALLCDFYRMPRQVFNAQKKAQSSIN

SEQ ID NO: 471 - protein, 166 aa, synthetic construct
SEVEFSHEYWMRHALTLAKRARDEGEVPVGAVLVLNNRVIGEGWNRAIGLYDPTAHAEIMALRQGGLVMQNYRLIDATLYVTFEPCVMCAGAMIHSRIGRVVFGVRNSKRGAAGSLMNVLNYPGMDHRVEITEGILADECAALLCDFYRMPRQVFNAQKKAQSSIN

SEQ ID NO: 472 - protein, 166 aa, synthetic construct
SEVEFSHEYWMRHALTLAKRARDEGEVPVGAVLVLNNRVIGEGWNRAIGLHDPTAHAEIMALRQGGLVMQNYRLIDATLYVTFEPCVMCAGAMIHSRIGRVVFGVRNSKRGAAGSLMNVLNYPGMDHRVEITEGILADECAALLCDFYRMPRQVFNAQKKAQSSIN

SEQ ID NO: 473 - protein, 166 aa, synthetic construct
SEVEFSHEYWMRHALTLAKRARDEREVPVGAVLVLNNRVIGEGWNRAIGLHDPTAHAEIMALRQGGLVMQNYGLIDATLYVTFEPCVMCAGAIIHSRIGRVVFGVRNSKRGAAGSLMNVLNYPGMNHRVEITEGILADECAALLCDFYRMPRQVFNAQKKAQSSIN

SEQ ID NO: 474 - protein, 166 aa, synthetic construct
SEVEFSHEYWMRHALTLAKRARDEREVPVGAVLVLNNRVIGEGWNRAIGLHDPTAHAEIMALRQGGLVMQNYRLIDATLYVTFEPCVMCAGAMIHSRIGRVVFGVRNSKRGAAGSLMNVLNYPGMDHRVEITEGILADECAALLCDFYRMPRQVFNAQKKAQSSIN

SEQ ID NO: 475 - protein, 166 aa, synthetic construct
SEVEFSHEYWMRHALTLAKRARDEGEVPVGAVLVLNNRVIGEGWNRAIGLYDPTAHAEIMALRQGGLVMQNYGLIDATLYVTFEPCVMCAGAMIHSRIGRVVFGVRNSKRGAAGSLMNVLNYPGMDHRVEITEGILADECAALLCDFYRMPRQVFNAQKKAQSSIN

SEQ ID NO: 476 - protein, 166 aa, synthetic construct
SEVEFSHEYWMRHALTLAKRARDEGEVPVGAVLVLNNRVIGEGWNRAIGLYDPTAHAEIMALRQGGLVMQNYGLIDATLYSTFEPCVMCAGAMIHSRIGRVVFGVRNSKRGAAGSLMNVLNYPGMDHRVEITEGILADECAALLCDFYRMPRRVFNAQKKAQSSIN

SEQ ID NO: 477 - protein, 166 aa, synthetic construct
SEVEFSHEYWMRHALTLAKRARDEGEVPVGAVLVLNNRVIGEGWNRAIGLYDPTAHAEIMALRQGGLVMQNYRLIDATLYVTFEPCVMCAGAMIHSRIGRVVFGVRNSKRGAAGSLMNVLNYPGMDHRVEITEGILANECAALLCDFYRMPRQVFNAQKKAQSSIN

SEQ ID NO: 478 - protein, 166 aa, synthetic construct
SEVEFSHEYWMRHALTLAKRARDEREVPVGAVLVLNNRVIGEGWNRAIGLHDPTAHAEIMALRQGGLVMQNYRLYDATLYSTFEPCVMCAGAMIHSRIGRVVFGVRNAKTGAAGSLMDVLHHPGMNHRVEITEGILADECAALLCRFFRMPRRVFNAQKKAQSSTD

SEQ ID NO: 479 - protein, 160 aa, Staphylococcus aureus; identical to SEQ ID NO: 309

SEQ ID NO: 480 - protein, 161 aa, Bacillus subtilis; identical to SEQ ID NO: 310

SEQ ID NO: 481 - protein, 183 aa, Salmonella enterica; identical to SEQ ID NO: 311
  source 1..183: note = serovar Typhimurium

SEQ ID NO: 482 - protein, 164 aa, Shewanella putrefaciens; identical to SEQ ID NO: 312

SEQ ID NO: 483 - protein, 173 aa, Haemophilus influenzae; identical to SEQ ID NO: 313

SEQ ID NO: 484 - protein, 161 aa, Caulobacter crescentus; identical to SEQ ID NO: 314

SEQ ID NO: 485 - protein, 178 aa, Geobacter sulfurreducens
MSSLKKTPIRDDAYWMGKAIREAAKAAARDEVPIGAVIVRDGAVIGRGHNLREGSNDPSAHAEMIAIRQAARRSANWRLTGATLYVTLEPCLMCMGAIILARLERVVFGCYDPKGAAGSLYDLSADPRLNHQVRLSPGVCQEECGTMLSDFFRDLRRRKKAKATPALFIDERKVPPEP

SEQ ID NO: 486 - protein, 171 aa, Streptococcus pyogenes
MPYSLEEQTYFMQEALKEAEKSLQKAEIPIGCVIVKDGEIIGRGHNAREESNQAIMHAEIMAINEANAHEGNWRLLDTTLFVTIEPCVMCSGAIGLARIPHVIYGASNQKFGGADSLYQILTDERLNHRVQVERGLLAADCANIMQTFFRQGRERKKIAKHLIKEQSDPFD

SEQ ID NO: 487 - protein, 151 aa, Aquifex aeolicus
MGKEYFLKVALREAKRAFEKGEVPVGAIIVKEGEIISKAHNSVEELKDPTAHAEMLAIKEACRRLNTKYLEGCELYVTLEPCIMCSYALVLSRIEKVIFSALDKKHGGVVSVFNILDEPTLNHRVKWEYYPLEEASELLSEFFKKLRNNII

SEQ ID NO: 488 - protein, 178 aa, Escherichia coli
MRRAFITGVFFLSEVEFSHEYWMRHALTLAKRAWDEREVPVGAVLVHNNRVIGEGWNRPIGRHDPTAHAEIMALRQGGLVMQNYRLIDATLYVTLEPCVMCAGAMIHSRIGRVVFGARDAKTGAAGSLMDVLHHPGMNHRVEITEGILADECAALLSDFFRMRRQEIKAQKKAQSSTD

SEQ ID NO: 489 - protein, 167 aa, synthetic construct
MSEVEFSHEYWMRHALTLAKRARDEREVPVGAVLVLNNRVIGEGWNRAIGLHDPTAHAEIMALRQGGLVMQNYRLIDATLYVTFEPCVMCAGAMIHSRIGRVVFGVRNSKRGAAGSLMNVLNYPGMNHRVEITEGILADECAALLCDFYRMPRQVFNAQKKAQSSIN

SEQ ID NO: 490 - protein, 167 aa, synthetic construct
MSEVEFSHEYWMRHALTLAKRARDEGAGPVGAVLVLNNRVIGEGWNRAIGLHDPTAHAEIMALRQGGLVMQNYRLFDATLYVTFEPCVMCAGAMINSRIGRVVFGVRNSKRGAAGSLMNVLNYPGMNHRVEITEGILADECAALLCDFYRMPRQVFNSQKKAQSSIN

SEQ ID NO: 491 - protein, 167 aa, synthetic construct
MSEVEFSHEYWMRHALTLAKRARDEGAGPVGAVLVLNNRVIGEGWNRAIGLHDPTAHAEIMALRQGGLVMQNYRLFDATLYVTFEPCVMCAGAMINSRIGRVVFGVRNSKRGAAGSLMNVLNYPGMNHRVEITEGILADECAALLCDFYRMPRRVFNSQKKAQSSIN

SEQ ID NO: 492 - protein, 167 aa, synthetic construct
MSEVEFSHEYWMRHALTLAKRARDEGAGPVGAVLVLNNRVIGEGWNRAIGLHDPTAHAEIMALRQGGLVMQNYRLFDATLYVTFEPCVMCAGAMINSRIGRVVFGVRNSKRGAAGSLMNVLNYPGMNHRVEITEGILADECAALLCDFYRIPRQVFNSQKKAQSSIN

SEQ ID NO: 493 - protein, 167 aa, synthetic construct
MSEVEFSHEYWMRHALTLAKRARDERKAPVGAVLVLNNRVIGEGWNRAIGLHDPTAHAEIIALRQGGLVMQNYRLIDATLYVTFEPCVMCAGAMINSRIGRVVFGVRNSKRGAAGSLMNVLNYPGMNHRVEITEGILADECAALLCDFYRMPRQVFNAQKKAQSSIN

SEQ ID NO: 494 - protein, 167 aa, synthetic construct
MSEVEFSHEYWMRHALTLAKRARDERAGPVGAVLVLNNRVIGEGWNRAIGLHDPTAHAEIMALRQGGLVMQNHRLIDATLYVTFEPCVMCAGAMINSRIGRVVFGVRNSKRGAAGSLMNVLNYPGMNHRVEITEGILADECAALLCDFYRMPRHVFNSQKKAQSSIN

SEQ ID NO: 495 - protein, 167 aa, synthetic construct
MSEVEFSHEYWMRHALTLAKRARDEGEAPVGAVLVLNNRVIGEGWNRRIGLHDPTAHAEIMALRQGGLVMQNSRLIDATLYVTFEPCVMCAGAMINSRIGRVVFGVRNSKRGAAGSLMNVLNYPGMNHRVEITEGILADECAALLCDFYRMPRQVFNAQKKAQSSIN

SEQ ID NO: 496 - protein, 167 aa, synthetic construct
MSEVEFSHEYWMRHALTLAKRARDEGEGPVGAVLVLNNRVIGEGWNRRIGLHDPTAHAEIMALRQGGLVMQNCRLIDATLYVTFEPCVMCAGAMIHSRIGRVVFGVRNSKRGAAGSLMNVLNYPGMNHRVEITEGILADECAALLCDFYRMPRQVFNAQKKAQSSIN

SEQ ID NO: 497 - protein, 167 aa, synthetic construct
MSEVEFSHEYWMRHALTLAKRARDEGEAPVGAVLVLNNRVIGEGWIRRIGLHDPTAHAEIMALRQGGLVMQNPRLIDATLYVTFEPCVMCAGAMINSRIGRVVFGVRNSKRGAAGSLMNVLNYPGMNHRVEITEGILADECAALLCDFYRMPRQVFNAQKKAQSSIN

SEQ ID NO: 498 - protein, 167 aa, synthetic construct
MSEVEFSHEYWMRHALTLAKRARDEGEAPVGAVLVLNNRVIGEGWTRRIGLHDPTAHAEIMALRQGGLVMQNSRLIDATLYVTFEPCVMCAGAMINSRIGRVVFGVRNSKRGAAGSLMNVLNYPGMNHRVEITEGILADECAALLCDFYRMPRHVFNAQKKAQSSIN

SEQ ID NO: 499 - protein, 167 aa, synthetic construct
MSEVEFSHEYWMRHALTLAKRARDEGEAPVGAVLVLNNRVIGEGWTRRIGLHDPTAHAEIMALRQGGLVMQNSRLIDATLYVTFEPCVMCAGAMINSRIGRVVFGVRNSKRGAAGSLMNVLNYPGMNHRVEITEGILADECAALLCDFYRMPRQVFNAQKKAQSSIN

SEQ ID NO: 500 - protein, 167 aa, synthetic construct
MSEVEFSHEYWMRHALTLAKRARDEGEAPVGAVLVLNNRVIGEGWVRRIGLHDPTAHAEIMALRQGGLVMQNSRLIDATLYVTFEPCVMCAGAMINSRIGRVVFGVRNSKRGAAGSLMNVLNYPGMNHRVEITEGILADECAALLCDFYRMPRQVFNAQKKAQSSIN

SEQ ID NO: 501 - protein, 167 aa, synthetic construct
MSEVEFSHEYWMRHALTLAKRARDEGEAPVGAVLVLNNRVIGEGWVRRIGLHDPTAHAEIMALRQGGLVMQNPRLIDATLYVTFEPCVMCAGAMINSRIGRVVFSVRNSKRGAAGSLMNVLNYPGMNHRVEITEGILADECAALLCDFYRMPRQVFNAQKKAQSSIN

SEQ ID NO: 502 - protein, 167 aa, synthetic construct
MSEVEFSHEYWMRHALTLAKRARDEGEAPVGAVLVLNNRVIGEGWLRRIGLHDPTAHAEIMALRQGGLVMQNPRLIDATLYVTFEPCVMCAGAMINSRIGRVVFGVRNSKRGAAGSLMNVLNYPGMNHRVEITEGILADECAALLCDFYRMPRQVFNAQKKAQSSIN

SEQ ID NO: 503 - protein, 167 aa, synthetic construct
MSEVEFSHEYWMRHALTLAKRARDEREAPVGAVLVLNNRVIGEGWLRPIGLHDPTAHAEIMALRQGGLVMQNPRLIDATLYVTFEPCVMCAGAMIHSRIGRVVFGVRNSKRGAAGSLMNVLNYPGMNHRVEITEGILADECAALLCDFYRMPRQVFNAQKKAQSSIN

SEQ ID NO: 504 - protein, 167 aa, synthetic construct
MSEVEFSHEYWMRHALTLAKRARDEGEAPVGAVLVLNNRVIGEGWCRRIGLHDPTAHAEIMALRQGGLVMQNSRLIDATLYVTFEPCVMCAGAMIHSRIGRVVFGVRNSKRGAAGSLMNVLNYPGMNHRVEITEGILADECAALLCDFYRMPRQVFNAQKKAQSSIN

SEQ ID NO: 505 - protein, 167 aa, synthetic construct
MSEVEFSHEYWMRHALTLAKRARDEGEAPVGAVLVLNNRVIGEGWVRRIGLHDPTAHAEIMALRQGGLVMQNPRLIDATLYVTFEPCVMCAGAMINSRIGRVVFGVRNSKRGAAGSLMNVLNYPGMNHRVEITEGILADECAALLCDFYRMPRQVFNAQKKAQSSIN

SEQ ID NO: 506 - protein, 167 aa, synthetic construct
MSEVEFSHEYWMRHALTLAKRARDEGEAPVGAVLVLNNRVIGEGWVRRIGLHDPTAHAEIMALRQGGLVMHNPRLIDATLYVTFEPCVMCAGAMINSRIGRVVFGVRNSKRGAAGSLMNVLNYPGMNHRVEITEGILADECAALLCDFYRMPRQVFNAQKKAQSSIN

SEQ ID NO: 507 - protein, 167 aa, synthetic construct
MSEVEFSHEYWMRHALTLAKRARDEGEAPVGAVLVLNNRVIGEGWLRRIGLHDPTAHAEIMALRQGGLVMQNSRLIDATLYVTFEPCVMCAGAMINSRIGRVVFGVRNSKRGAAGSLMNVLNYPGMNHRVEITEGILADECAALLCDFYRMPRQVFNAQKKAQSSIN

SEQ ID NO: 508 - protein, 167 aa, synthetic construct
MSEVEFSHEYWMRHALTLAKRARDEGEAPVGAVLVLNNRVIGEGWCRRIGLHDPTAHAEIMALRQGGLVMQNPRLIDATLYVTFEPCVMCAGAMINSRIGRVVFGVRNSKRGAAGSLMNVLNYPGMNHRVEITEGILADECAALLCDFYRMPRQVFNAQKKAQSSIN

SEQ ID NO: 509 - protein, 167 aa, synthetic construct
MSEVEFSHEYWMRHALTLAKRARDEGEAPVGAVLVLNNRVIGEGWCRRIGLHDPTAHAEIMALRQGGLVMQNPRLIDATLYVTFEPCVMCAGAMINSRIGRVVFGVRNSKRGAAGSLMNVLNYPGMNHRVEITEGILADECAALLCDFYRMPRQVFNAQKKVQSSIN

SEQ ID NO: 510 - protein, 167 aa, synthetic construct
MSEVEFSHEYWMRHALTLAKRARDEGEAPVGAVLVLNNRVIGEGWIRRIGLHDPTAHAEIMALRQGGLVMQNSRLIDATLYVTFEPCVMCAGAMINSRIGRVVFGVRNSKRGAAGSLMNVLNYPGMNHRVEITEGILADECAALLCDFYRMPRQVFNAQKKAQSSIN

SEQ ID NO: 511 - protein, 167 aa, synthetic construct
MSEVEFSHEYWMRHALTLAKRARDEGEAPVGAVLVLNNRVIGEGWNRRIGLHDPTAHAEIMALRQGGLVMSNSRLIDATLYVTFEPCVMCAGAMINSRIGRVVFGVRNSKRGAAGSLMNVLNYPGMNHRVEITEGILADECAALLCDFYRMPRQVFNAQKKAQSSIN

SEQ ID NO: 512 - protein, 167 aa, synthetic construct
MSEVEFSHEYWMRHALTLAKRARDEGEAPVGAVLVLNNRVIGEGWLRRIGLHDPTAHAEIMALRQGGLVMQNPRLIDATLYVTFEPCVMCAGAMIHSRIGRVVFGVRNSKRGAAGSLMNVLNYPGMNHRVEITEGILADECAALLCDFYRMPRQVFNAQKKAQSSIN

SEQ ID NO: 513 - protein, 167 aa, synthetic construct; identical to SEQ ID NO: 502

SEQ ID NO: 514 - protein, 167 aa, synthetic construct
MSEVEFSHEYWMRHALTLAKRARDEGEAPVGAVLVLNNRVIGEGWNRAIGLHDPTAHAEIMALRQGGLVMQNPRLIDATLYVTFEPCVMCAGAMINSRIGRVVFGVRNSKRGAAGSLMNVLNYPGMNHRVEITEGILADECAALLCDFYRMPRQVFNAQKKAQSSIN

SEQ ID NO: 515 - protein, 167 aa, synthetic construct; identical to SEQ ID NO: 500

SEQ ID NO: 516 - protein, 167 aa, synthetic construct; identical to SEQ ID NO: 505

SEQ ID NO: 517 - protein, 167 aa, synthetic construct
MSEVEFSHEYWMRHALTLAKRARDEGEVPVGAVLVLNNRVIGEGWLRAIGLHDPTAHAEIMALRQGGLVMQNYRLIDATLYVTFEPCVMCAGAMIHSRIGRVVFGVRNSKRGAAGSLMNVLNYPGMNHRVEITEGILADECAALLCDFYRMPRQVFNAQKKAQSSIN

SEQ ID NO: 518 - protein, 167 aa, synthetic construct; identical to SEQ ID NO: 497

SEQ ID NO: 519 - protein, 167 aa, synthetic construct; identical to SEQ ID NO: 501

SEQ ID NO: 520 - protein, 167 aa, synthetic construct
MSEVEFSHEYWMRHALTLAKRARDEGEAPVGAVLVLNNRVIGEGWNRPIGLHDPTAHAEIMALRQGGLVMQNHRLIDAPLYVTFEPCVMCAGAMINSRIGRVVFGVRNSKRGAAGSLMNVLNYPGMNHRVEITEGILADECAALLCDFYRMPRQVFNAQKKAQSSIN

SEQ ID NO: 521 - protein, 167 aa, synthetic construct
MSEVEFSHEYWMRHALTLAKRARDEGEVPVGAVLVLNNRVIGEGWIRAIGLHDPTAHAEIMALRQGGLVMQNYRLIDATLYVTFEPCVMCAGAMINSRIGRVVFGVRNSKRGAAGSLMNVLNYPGMNHRVEITEGILADECAALLCDFYRMPRQVFNAQKKAQSSIN

SEQ ID NO: 522 - protein, 167 aa, synthetic construct; identical to SEQ ID NO: 505

SEQ ID NO: 523 - protein, 167 aa, synthetic construct; identical to SEQ ID NO: 507

SEQ ID NO: 524 - protein, 167 aa, synthetic construct
MSEVEFSHEYWMRHALTLAKRARDEGEAPVGAVLVLNNRVIGEGWCRRIGLHDPTAHAEIMALRQGGLVMQNYRLIDATLYVTFEPCVMCAGAMINSRIGRVVFGVRNSKRGAAGSLMNVLNYPGMNHRVEITEGILADECAALLCDFYRMPRQVFNAQKKVQSSIN

SEQ ID NO: 525 - protein, 167 aa, synthetic construct; identical to SEQ ID NO: 506

SEQ ID NO: 526 - protein, 167 aa, synthetic construct; identical to SEQ ID NO: 508

SEQ ID NO: 527 - protein, 167 aa, synthetic construct; identical to SEQ ID NO: 509

SEQ ID NO: 528 - protein, 167 aa, synthetic construct; identical to SEQ ID NO: 505

SEQ ID NO: 529 - protein, 167 aa, synthetic construct; identical to SEQ ID NO: 500

SEQ ID NO: 530 - protein, 167 aa, synthetic construct
MSEVEFSHEYWMRHALTLAKRARDEGEAPVGAVLVLNNRVIGEGWVRPIGLHDPTAHAEIMALRQGGLVMQNSRLIDATLYVTFEPCVMCAGAMINSRIGRVVFGVRNSKRGAAGSLMNVLNYPGMNHRVEITEGILADECAALLCDFYRMPRQVFNAQKKAQSSIN

SEQ ID NO: 531 - protein, 167 aa, synthetic construct; identical to SEQ ID NO: 508

SEQ ID NO: 532 - protein, 167 aa, synthetic construct
MSEVEFSHEYWMRHALTLAKRARDEGEAPVGAVMVLNNRVIGEGWLRRIGLHDPTAHAEIMALRQGGLVMQNPRLIDATLYVTFEPCVMCAGAMINSRIGRVVFGVRNSKRGAAGSLMNVLNYPGMNHRVEITEGILADECAALLCDFYRMPRQVFNAQKKAQSSIN

SEQ ID NO: 533 - protein, 167 aa, synthetic construct; identical to SEQ ID NO: 502

SEQ ID NO: 534 - protein, 167 aa, synthetic construct
MSEVEFSHEYWMRHALTLAKRARDEGEAPVGAVLVLNNRVIGEGWLRPIGLHDPTAHAEIMALKQGGLVMQNPRLIDATLYVTFEPCVMCAGAMINSRIGRVVFGVRNSKRGAAGSLMNVLNYPGMNHRVEITEGILADECAALLCDFYRMPRQVFNAQKKAQSSIN

SEQ ID NO: 535 - protein, 1699 aa, synthetic construct
MKRTADGSEFESPKKKRKVSSEVEFSHEYWMRHALTLAKRARDEGAGPVGAVLVLNNRVIGEGWNRAIGLHDPTAHAEIMALRQGGLVMQNYRLFDATLYVTFEPCVMCAGAMINSRIGRVVFGVRNSKRGAAGSLMNVLNYPGMNHRVEITEGILADECAALLCDFYRMPRQVFNSQKKAQSSINSGGSSGGSSGSETPGTSESATPESSGGSSGGSDKKYSIGLAIGTNSVGWAVITDEYKVPSKKFKVLGNTDRHSIKKNLIGALLFDSGETAEATRLKRTARRRYTRRKNRICYLQEIFSNEMAKVDDSFFHRLEESFLVEEDKKHERHPIFGNIVDEVAYHEKYPTIYHLRKKLVDSTDKADLRLIYLALAHMIKFRGHFLIEGDLNPDNSDVDKLFIQLVQTYNQLFEENPINASGVDAKAILSARLSKSRRLENLIAQLPGEKKNGLFGNLIALSLGLTPNFKSNFDLAEDAKLQLSKDTYDDDLDNLLAQIGDQYADLFLAAKNLSDAILLSDILRVNTEITKAPLSASMIKRYDEHHQDLTLLKALVRQQLPEKYKEIFFDQSKNGYAGYIDGGASQEEFYKFIKPILEKMDGTEELLVKLNREDLLRKQRTFDNGSIPHQIHLGELHAILRRQEDFYPFLKDNREKIEKILTFRIPYYVGPLARGNSRFAWMTRKSEETITPWNFEEVVDKGASAQSFIERMTNFDKNLPNEKVLPKHSLLYEYFTVYNELTKVKYVTEGMRKPAFLSGEQKKAIVDLLFKTNRKVTVKQLKEDYFKKIECFDSVEISGVEDRFNASLGTYHDLLKIIKDKDFLDNEENEDILEDIVLTLTLFEDREMIEERLKTYAHLFDDKVMKQLKRRRYTGWGRLSRKLINGIRDKQSGKTILDFLKSDGFANRNFMQLIHDDSLTFKEDIQKAQVSGQGDSLHEHIANLAGSPAIKKGILQTVKVVDELVKVMGRHKPENIVIEMARENQTTQKGQKNSRERMKRIEEGIKELGSQILKEHPVENTQLQNEKLYLYYLQNGRDMYVDQELDINRLSDYDVDHIVPQSFLKDDSIDNKVLTRSDKNRGKSDNVPSEEVVKKMKNYWRQLLNAKLITQRKFDNLTKAERGGLSELDKAGFIKRQLVETRQITKHVAQILDSRMNTKYDENDKLIREVKVITLKSKLVSDFRKDFQFYKVREINNYHHAHDAYLNAVVGTALIKKYPKLESEFVYGDYKVYDVRKMIAKSEQEIGKATAKYFFYSNIMNFFKTEITLANGEIRKRPLIETNGETGEIVWDKGRDFATVRKVLSMPQVNIVKKTEVQTGGFSKESILPKRNSDKLIARKKDWDPKKYGGFDSPTVAYSVLVVAKVEKGKSKKLKSVKELLGITIMERSSFEKNPIDFLEAKGYKEVKKDLIIKLPKYSLFELENGRKRMLASAGELQKGNELALPSKYVNFLYLASHYEKLKGSPEDNEQKQLFVEQHKHYLDEIIEQISEFSKRVILADANLDKVLSAYNKHRDKPIREQAENIIHLFTLTNLGAPAAFKYFDTTIDRKRYTSTKEVLDATLIHQSITGLYETRIDLSQLGGDSGGSGGSGGSTNLSDIIEKETGKQLVIQESILMLPEEVEEVIGNKPESDILVHTAYDESTDENVMLLTSDAPEYKPWALVIQDSNGENKIKMLSGGSKRTADGSEFEPKKKRKV

SEQ ID NO: 536 - protein, 1699 aa, synthetic construct
MKRTADGSEFESPKKKRKVSSEVEFSHEYWMRHALTLAKRARDEGAGPVGAVLVLNNRVIGEGWNRAIGLHDPTAHAEIMALRQGGLVMQNYRLFDATLYVTFEPCVMCAGAMINSRIGRVVFGVRNSKRGAAGSLMNVLNYPGMNHRVEITEGILADECAALLCDFYRMPRRVFNSQKKAQSSINSGGSSGGSSGSETPGTSESATPESSGGSSGGSDKKYSIGLAIGTNSVGWAVITDEYKVPSKKFKVLGNTDRHSIKKNLIGALLFDSGETAEATRLKRTARRRYTRRKNRICYLQEIFSNEMAKVDDSFFHRLEESFLVEEDKKHERHPIFGNIVDEVAYHEKYPTIYHLRKKLVDSTDKADLRLIYLALAHMIKFRGHFLIEGDLNPDNSDVDKLFIQLVQTYNQLFEENPINASGVDAKAILSARLSKSRRLENLIAQLPGEKKNGLFGNLIALSLGLTPNFKSNFDLAEDAKLQLSKDTYDDDLDNLLAQIGDQYADLFLAAKNLSDAILLSDILRVNTEITKAPLSASMIKRYDEHHQDLTLLKALVRQQLPEKYKEIFFDQSKNGYAGYIDGGASQEEFYKFIKPILEKMDGTEELLVKLNREDLLRKQRTFDNGSIPHQIHLGELHAILRRQEDFYPFLKDNREKIEKILTFRIPYYVGPLARGNSRFAWMTRKSEETITPWNFEEVVDKGASAQSFIERMTNFDKNLPNEKVLPKHSLLYEYFTVYNELTKVKYVTEGMRKPAFLSGEQKKAIVDLLFKTNRKVTVKQLKEDYFKKIECFDSVEISGVEDRFNASLGTYHDLLKIIKDKDFLDNEENEDILEDIVLTLTLFEDREMIEERLKTYAHLFDDKVMKQLKRRRYTGWGRLSRKLINGIRDKQSGKTILDFLKSDGFANRNFMQLIHDDSLTFKEDIQKAQVSGQGDSLHEHIANLAGSPAIKKGILQTVKVVDELVKVMGRHKPENIVIEMARENQTTQKGQKNSRERMKRIEEGIKELGSQILKEHPVENTQLQNEKLYLYYLQNGRDMYVDQELDINRLSDYDVDHIVPQSFLKDDSIDNKVLTRSDKNRGKSDNVPSEEVVKKMKNYWRQLLNAKLITQRKFDNLTKAERGGLSELDKAGFIKRQLVETRQITKHVAQILDSRMNTKYDENDKLIREVKVITLKSKLVSDFRKDFQFYKVREINNYHHAHDAYLNAVVGTALIKKYPKLESEFVYGDYKVYDVRKMIAKSEQEIGKATAKYFFYSNIMNFFKTEITLANGEIRKRPLIETNGETGEIVWDKGRDFATVRKVLSMPQVNIVKKTEVQTGGFSKESILPKRNSDKLIARKKDWDPKKYGGFDSPTVAYSVLVVAKVEKGKSKKLKSVKELLGITIMERSSFEKNPIDFLEAKGYKEVKKDLIIKLPKYSLFELENGRKRMLASAGELQKGNELALPSKYVNFLYLASHYEKLKGSPEDNEQKQLFVEQHKHYLDEIIEQISEFSKRVILADANLDKVLSAYNKHRDKPIREQAENIIHLFTLTNLGAPAAFKYFDTTIDRKRYTSTKEVLDATLIHQSITGLYETRIDLSQLGGDSGGSGGSGGSTNLSDIIEKETGKQLVIQESILMLPEEVEEVIGNKPESDILVHTAYDESTDENVMLLTSDAPEYKPWALVIQDSNGENKIKMLSGGSKRTADGSEFEPKKKRKV

SEQ ID NO: 537 - protein, 1699 aa, synthetic construct
MKRTADGSEFESPKKKRKVSSEVEFSHEYWMRHALTLAKRARDEGAGPVGAVLVLNNRVIGEGWNRAIGLHDPTAHAEIMALRQGGLVMQNYRLFDATLYVTFEPCVMCAGAMINSRIGRVVFGVRNSKRGAAGSLMNVLNYPGMNHRVEITEGILADECAALLCDFYRIPRQVFNSQKKAQSSINSGGSSGGSSGSETPGTSESATPESSGGSSGGSDKKYSIGLAIGTNSVGWAVITDEYKVPSKKFKVLGNTDRHSIKKNLIGALLFDSGETAEATRLKRTARRRYTRRKNRICYLQEIFSNEMAKVDDSFFHRLEESFLVEEDKKHERHPIFGNIVDEVAYHEKYPTIYHLRKKLVDSTDKADLRLIYLALAHMIKFRGHFLIEGDLNPDNSDVDKLFIQLVQTYNQLFEENPINASGVDAKAILSARLSKSRRLENLIAQLPGEKKNGLFGNLIALSLGLTPNFKSNFDLAEDAKLQLSKDTYDDDLDNLLAQIGDQYADLFLAAKNLSDAILLSDILRVNTEITKAPLSASMIKRYDEHHQDLTLLKALVRQQLPEKYKEIFFDQSKNGYAGYIDGGASQEEFYKFIKPILEKMDGTEELLVKLNREDLLRKQRTFDNGSIPHQIHLGELHAILRRQEDFYPFLKDNREKIEKILTFRIPYYVGPLARGNSRFAWMTRKSEETITPWNFEEVVDKGASAQSFIERMTNFDKNLPNEKVLPKHSLLYEYFTVYNELTKVKYVTEGMRKPAFLSGEQKKAIVDLLFKTNRKVTVKQLKEDYFKKIECFDSVEISGVEDRFNASLGTYHDLLKIIKDKDFLDNEENEDILEDIVLTLTLFEDREMIEERLKTYAHLFDDKVMKQLKRRRYTGWGRLSRKLINGIRDKQSGKTILDFLKSDGFANRNFMQLIHDDSLTFKEDIQKAQVSGQGDSLHEHIANLAGSPAIKKGILQTVKVVDELVKVMGRHKPENIVIEMARENQTTQKGQKNSRERMKRIEEGIKELGSQILKEHPVENTQLQNEKLYLYYLQNGRDMYVDQELDINRLSDYDVDHIVPQSFLKDDSIDNKVLTRSDKNRGKSDNVPSEEVVKKMKNYWRQLLNAKLITQRKFDNLTKAERGGLSELDKAGFIKRQLVETRQITKHVAQILDSRMNTKYDENDKLIREVKVITLKSKLVSDFRKDFQFYKVREINNYHHAHDAYLNAVVGTALIKKYPKLESEFVYGDYKVYDVRKMIAKSEQEIGKATAKYFFYSNIMNFFKTEITLANGEIRKRPLIETNGETGEIVWDKGRDFATVRKVLSMPQVNIVKKTEVQTGGFSKESILPKRNSDKLIARKKDWDPKKYGGFDSPTVAYSVLVVAKVEKGKSKKLKSVKELLGITIMERSSFEKNPIDFLEAKGYKEVKKDLIIKLPKYSLFELENGRKRMLASAGELQKGNELALPSKYVNFLYLASHYEKLKGSPEDNEQKQLFVEQHKHYLDEIIEQISEFSKRVILADANLDKVLSAYNKHRDKPIREQAENIIHLFTLTNLGAPAAFKYFDTTIDRKRYTSTKEVLDATLIHQSITGLYETRIDLSQLGGDSGGSGGSGGSTNLSDIIEKETGKQLVIQESILMLPEEVEEVIGNKPESDILVHTAYDESTDENVMLLTSDAPEYKPWALVIQDSNGENKIKMLSGGSKRTADGSEFEPKKKRKV

SEQ ID NO: 538 - protein, 1699 aa, synthetic construct
MKRTADGSEFESPKKKRKVSSEVEFSHEYWMRHALTLAKRARDERKAPVGAVLVLNNRVIGEGWNRAIGLHDPTAHAEIIALRQGGLVMQNYRLIDATLYVTFEPCVMCAGAMINSRIGRVVFGVRNSKRGAAGSLMNVLNYPGMNHRVEITEGILADECAALLCDFYRMPRQVFNAQKKAQSSINSGGSSGGSSGSETPGTSESATPESSGGSSGGSDKKYSIGLAIGTNSVGWAVITDEYKVPSKKFKVLGNTDRHSIKKNLIGALLFDSGETAEATRLKRTARRRYTRRKNRICYLQEIFSNEMAKVDDSFFHRLEESFLVEEDKKHERHPIFGNIVDEVAYHEKYPTIYHLRKKLVDSTDKADLRLIYLALAHMIKFRGHFLIEGDLNPDNSDVDKLFIQLVQTYNQLFEENPINASGVDAKAILSARLSKSRRLENLIAQLPGEKKNGLFGNLIALSLGLTPNFKSNFDLAEDAKLQLSKDTYDDDLDNLLAQIGDQYADLFLAAKNLSDAILLSDILRVNTEITKAPLSASMIKRYDEHHQDLTLLKALVRQQLPEKYKEIFFDQSKNGYAGYIDGGASQEEFYKFIKPILEKMDGTEELLVKLNREDLLRKQRTFDNGSIPHQIHLGELHAILRRQEDFYPFLKDNREKIEKILTFRIPYYVGPLARGNSRFAWMTRKSEETITPWNFEEVVDKGASAQSFIERMTNFDKNLPNEKVLPKHSLLYEYFTVYNELTKVKYVTEGMRKPAFLSGEQKKAIVDLLFKTNRKVTVKQLKEDYFKKIECFDSVEISGVEDRFNASLGTYHDLLKIIKDKDFLDNEENEDILEDIVLTLTLFEDREMIEERLKTYAHLFDDKVMKQLKRRRYTGWGRLSRKLINGIRDKQSGKTILDFLKSDGFANRNFMQLIHDDSLTFKEDIQKAQVSGQGDSLHEHIANLAGSPAIKKGILQTVKVVDELVKVMGRHKPENIVIEMARENQTTQKGQKNSRERMKRIEEGIKELGSQILKEHPVENTQLQNEKLYLYYLQNGRDMYVDQELDINRLSDYDVDHIVPQSFLKDDSIDNKVLTRSDKNRGKSDNVPSEEVVKKMKNYWRQLLNAKLITQRKFDNLTKAERGGLSELDKAGFIKRQLVETRQITKHVAQILDSRMNTKYDENDKLIREVKVITLKSKLVSDFRKDFQFYKVREINNYHHAHDAYLNAVVGTALIKKYPKLESEFVYGDYKVYDVRKMIAKSEQEIGKATAKYFFYSNIMNFFKTEITLANGEIRKRPLIETNGETGEIVWDKGRDFATVRKVLSMPQVNIVKKTEVQTGGFSKESILPKRNSDKLIARKKDWDPKKYGGFDSPTVAYSVLVVAKVEKGKSKKLKSVKELLGITIMERSSFEKNPIDFLEAKGYKEVKKDLIIKLPKYSLFELENGRKRMLASAGELQKGNELALPSKYVNFLYLASHYEKLKGSPEDNEQKQLFVEQHKHYLDEIIEQISEFSKRVILADANLDKVLSAYNKHRDKPIREQAENIIHLFTLTNLGAPAAFKYFDTTIDRKRYTSTKEVLDATLIHQSITGLYETRIDLSQLGGDSGGSGGSGGSTNLSDIIEKETGKQLVIQESILMLPEEVEEVIGNKPESDILVHTAYDESTDENVMLLTSDAPEYKPWALVIQDSNGENKIKMLSGGSKRTADGSEFEPKKKRKV

SEQ ID NO: 539 - protein, 1699 aa, synthetic construct
MKRTADGSEFESPKKKRKVSSEVEFSHEYWMRHALTLAKRARDERAGPVGAVLVLNNRVIGEGWNRAIGLHDPTAHAEIMALRQGGLVMQNHRLIDATLYVTFEPCVMCAGAMINSRIGRVVFGVRNSKRGAAGSLMNVLNYPGMNHRVEITEGILADECAALLCDFYRMPRHVFNSQKKAQSSINSGGSSGGSSGSETPGTSESATPESSGGSSGGSDKKYSIGLAIGTNSVGWAVITDEYKVPSKKFKVLGNTDRHSIKKNLIGALLFDSGETAEATRLKRTARRRYTRRKNRICYLQEIFSNEMAKVDDSFFHRLEESFLVEEDKKHERHPIFGNIVDEVAYHEKYPTIYHLRKKLVDSTDKADLRLIYLALAHMIKFRGHFLIEGDLNPDNSDVDKLFIQLVQTYNQLFEENPINASGVDAKAILSARLSKSRRLENLIAQLPGEKKNGLFGNLIALSLGLTPNFKSNFDLAEDAKLQLSKDTYDDDLDNLLAQIGDQYADLFLAAKNLSDAILLSDILRVNTEITKAPLSASMIKRYDEHHQDLTLLKALVRQQLPEKYKEIFFDQSKNGYAGYIDGGASQEEFYKFIKPILEKMDGTEELLVKLNREDLLRKQRTFDNGSIPHQIHLGELHAILRRQEDFYPFLKDNREKIEKILTFRIPYYVGPLARGNSRFAWMTRKSEETITPWNFEEVVDKGASAQSFIERMTNFDKNLPNEKVLPKHSLLYEYFTVYNELTKVKYVTEGMRKPAFLSGEQKKAIVDLLFKTNRKVTVKQLKEDYFKKIECFDSVEISGVEDRFNASLGTYHDLLKIIKDKDFLDNEENEDILEDIVLTLTLFEDREMIEERLKTYAHLFDDKVMKQLKRRRYTGWGRLSRKLINGIRDKQSGKTILDFLKSDGFANRNFMQLIHDDSLTFKEDIQKAQVSGQGDSLHEHIANLAGSPAIKKGILQTVKVVDELVKVMGRHKPENIVIEMARENQTTQKGQKNSRERMKRIEEGIKELGSQILKEHPVENTQLQNEKLYLYYLQNGRDMYVDQELDINRLSDYDVDHIVPQSFLKDDSIDNKVLTRSDKNRGKSDNVPSEEVVKKMKNYWRQLLNAKLITQRKFDNLTKAERGGLSELDKAGFIKRQLVETRQITKHVAQILDSRMNTKYDENDKLIREVKVITLKSKLVSDFRKDFQFYKVREINNYHHAHDAYLNAVVGTALIKKYPKLESEFVYGDYKVYDVRKMIAKSEQEIGKATAKYFFYSNIMNFFKTEITLANGEIRKRPLIETNGETGEIVWDKGRDFATVRKVLSMPQVNIVKKTEVQTGGFSKESILPKRNSDKLIARKKDWDPKKYGGFDSPTVAYSVLVVAKVEKGKSKKLKSVKELLGITIMERSSFEKNPIDFLEAKGYKEVKKDLIIKLPKYSLFELENGRKRMLASAGELQKGNELALPSKYVNFLYLASHYEKLKGSPEDNEQKQLFVEQHKHYLDEIIEQISEFSKRVILADANLDKVLSAYNKHRDKPIREQAENIIHLFTLTNLGAPAAFKYFDTTIDRKRYTSTKEVLDATLIHQSITGLYETRIDLSQLGGDSGGSGGSGGSTNLSDIIEKETGKQLVIQESILMLPEEVEEVIGNKPESDILVHTAYDESTDENVMLLTSDAPEYKPWALVIQDSNGENKIKMLSGGSKRTADGSEFEPKKKRKV

SEQ ID NO: 540 - protein, 1699 aa, synthetic construct
MKRTADGSEFESPKKKRKVSSEVEFSHEYWMRHALTLAKRARDEGAGPVGAVLVLNNRVIGEGWNRAIGLHDPTAHAEIMALRQGGLVMQNYRLFDATLYVTFEPCVMCAGAMINSRIGRVVFGWRNSKRGAAGSLMNVLNYPGMNHRVEITEGILADECAALLCDFYRMPRQVFNSQKKAQSSINSGGSSGGSSGSETPGTSESATPESSGGSSGGSDKKYSIGLAIGTNSVGWAVITDEYKVPSKKFKVLGNTDRHSIKKNLIGALLFDSGETAEATRLKRTARRRYTRRKNRICYLQEIFSNEMAKVDDSFFHRLEESFLVEEDKKHERHPIFGNIVDEVAYHEKYPTIYHLRKKLVDSTDKADLRLIYLALAHMIKFRGHFLIEGDLNPDNSDVDKLFIQLVQTYNQLFEENPINASGVDAKAILSARLSKSRRLENLIAQLPGEKKNGLFGNLIALSLGLTPNFKSNFDLAEDAKLQLSKDTYDDDLDNLLAQIGDQYADLFLAAKNLSDAILLSDILRVNTEITKAPLSASMIKRYDEHHQDLTLLKALVRQQLPEKYKEIFFDQSKNGYAGYIDGGASQEEFYKFIKPILEKMDGTEELLVKLNREDLLRKQRTFDNGSIPHQIHLGELHAILRRQEDFYPFLKDNREKIEKILTFRIPYYVGPLARGNSRFAWMTRKSEETITPWNFEEVVDKGASAQSFIERMTNFDKNLPNEKVLPKHSLLYEYFTVYNELTKVKYVTEGMRKPAFLSGEQKKAIVDLLFKTNRKVTVKQLKEDYFKKIECFDSVEISGVEDRFNASLGTYHDLLKIIKDKDFLDNEENEDILEDIVLTLTLFEDREMIEERLKTYAHLFDDKVMKQLKRRRYTGWGRLSRKLINGIRDKQSGKTILDFLKSDGFANRNFMQLIHDDSLTFKEDIQKAQVSGQGDSLHEHIANLAGSPAIKKGILQTVKVVDELVKVMGRHKPENIVIEMARENQTTQKGQKNSRERMKRIEEGIKELGSQILKEHPVENTQLQNEKLYLYYLQNGRDMYVDQELDINRLSDYDVDHIVPQSFLKDDSIDNKVLTRSDKNRGKSDNVPSEEVVKKMKNYWRQLLNAKLITQRKFDNLTKAERGGLSELDKAGFIKRQLVETRQITKHVAQILDSRMNTKYDENDKLIREVKVITLKSKLVSDFRKDFQFYKVREINNYHHAHDAYLNAVVGTALIKKYPKLESEFVYGDYKVYDVRKMIAKSEQEIGKATAKYFFYSNIMNFFKTEITLANGEIRKRPLIETNGETGEIVWDKGRDFATVRKVLSMPQVNIVKKTEVQTGGFSKESILPKRNSDKLIARKKDWDPKKYGGFDSPTVAYSVLVVAKVEKGKSKKLKSVKELLGITIMERSSFEKNPIDFLEAKGYKEVKKDLIIKLPKYSLFELENGRKRMLASAGELQKGNELALPSKYVNFLYLASHYEKLKGSPEDNEQKQLFVEQHKHYLDEIIEQISEFSKRVILADANLDKVLSAYNKHRDKPIREQAENIIHLFTLTNLGAPAAFKYFDTTIDRKRYTSTKEVLDATLIHQSITGLYETRIDLSQLGGDSGGSGGSGGSTNLSDIIEKETGKQLVIQESILMLPEEVEEVIGNKPESDILVHTAYDESTDENVMLLTSDAPEYKPWALVIQDSNGENKIKMLSGGSKRTADGSEFEPKKKRKV

SEQ ID NO: 541 - protein, 1699 aa, synthetic construct
MKRTADGSEFESPKKKRKVSSEVEFSHEYWMRHALTLAKRARDERKAPVGAVLVLNNRVIGEGWNRAIGLHDPTAHAEIIALRQGGLVMQNYRLIDATLYVTFEPCVMCAGAMINSRIGRVVFGWRNSKRGAAGSLMNVLNYPGMNHRVEITEGILADECAALLCDFYRMPRQVFNAQKKAQSSINSGGSSGGSSGSETPGTSESATPESSGGSSGGSDKKYSIGLAIGTNSVGWAVITDEYKVPSKKFKVLGNTDRHSIKKNLIGALLFDSGETAEATRLKRTARRRYTRRKNRICYLQEIFSNEMAKVDDSFFHRLEESFLVEEDKKHERHPIFGNIVDEVAYHEKYPTIYHLRKKLVDSTDKADLRLIYLALAHMIKFRGHFLIEGDLNPDNSDVDKLFIQLVQTYNQLFEENPINASGVDAKAILSARLSKSRRLENLIAQLPGEKKNGLFGNLIALSLGLTPNFKSNFDLAEDAKLQLSKDTYDDDLDNLLAQIGDQYADLFLAAKNLSDAILLSDILRVNTEITKAPLSASMIKRYDEHHQDLTLLKALVRQQLPEKYKEIFFDQSKNGYAGYIDGGASQEEFYKFIKPILEKMDGTEELLVKLNREDLLRKQRTFDNGSIPHQIHLGELHAILRRQEDFYPFLKDNREKIEKILTFRIPYYVGPLARGNSRFAWMTRKSEETITPWNFEEVVDKGASAQSFIERMTNFDKNLPNEKVLPKHSLLYEYFTVYNELTKVKYVTEGMRKPAFLSGEQKKAIVDLLFKTNRKVTVKQLKEDYFKKIECFDSVEISGVEDRFNASLGTYHDLLKIIKDKDFLDNEENEDILEDIVLTLTLFEDREMIEERLKTYAHLFDDKVMKQLKRRRYTGWGRLSRKLINGIRDKQSGKTILDFLKSDGFANRNFMQLIHDDSLTFKEDIQKAQVSGQGDSLHEHIANLAGSPAIKKGILQTVKVVDELVKVMGRHKPENIVIEMARENQTTQKGQKNSRERMKRIEEGIKELGSQILKEHPVENTQLQNEKLYLYYLQNGRDMYVDQELDINRLSDYDVDHIVPQSFLKDDSIDNKVLTRSDKNRGKSDNVPSEEVVKKMKNYWRQLLNAKLITQRKFDNLTKAERGGLSELDKAGFIKRQLVETRQITKHVAQILDSRMNTKYDENDKLIREVKVITLKSKLVSDFRKDFQFYKVREINNYHHAHDAYLNAVVGTALIKKYPKLESEFVYGDYKVYDVRKMIAKSEQEIGKATAKYFFYSNIMNFFKTEITLANGEIRKRPLIETNGETGEIVWDKGRDFATVRKVLSMPQVNIVKKTEVQTGGFSKESILPKRNSDKLIARKKDWDPKKYGGFDSPTVAYSVLVVAKVEKGKSKKLKSVKELLGITIMERSSFEKNPIDFLEAKGYKEVKKDLIIKLPKYSLFELENGRKRMLASAGELQKGNELALPSKYVNFLYLASHYEKLKGSPEDNEQKQLFVEQHKHYLDEIIEQISEFSKRVILADANLDKVLSAYNKHRDKPIREQAENIIHLFTLTNLGAPAAFKYFDTTIDRKRYTSTKEVLDATLIHQSITGLYETRIDLSQLGGDSGGSGGSGGSTNLSDIIEKETGKQLVIQESILMLPEEVEEVIGNKPESDILVHTAYDESTDENVMLLTSDAPEYKPWALVIQDSNGENKIKMLSGGSKRTADGSEFEPKKKRKV

SEQ ID NO: 542 - protein, 1699 aa, synthetic construct
MKRTADGSEFESPKKKRKVSSEVEFSHEYWMRHALTLAKRARDEGEAPVGAVLVLNNRVIGEGWNRRIGLHDPTAHAEIMALRQGGLVMQNSRLIDATLYVTFEPCVMCAGAMINSRIGRVVFGVRNSKRGAAGSLMNVLNYPGMNHRVEITEGILADECAALLCDFYRMPRQVFNAQKKAQSSINSGGSSGGSSGSETPGTSESATPESSGGSSGGSDKKYSIGLAIGTNSVGWAVITDEYKVPSKKFKVLGNTDRHSIKKNLIGALLFDSGETAEATRLKRTARRRYTRRKNRICYLQEIFSNEMAKVDDSFFHRLEESFLVEEDKKHERHPIFGNIVDEVAYHEKYPTIYHLRKKLVDSTDKADLRLIYLALAHMIKFRGHFLIEGDLNPDNSDVDKLFIQLVQTYNQLFEENPINASGVDAKAILSARLSKSRRLENLIAQLPGEKKNGLFGNLIALSLGLTPNFKSNFDLAEDAKLQLSKDTYDDDLDNLLAQIGDQYADLFLAAKNLSDAILLSDILRVNTEITKAPLSASMIKRYDEHHQDLTLLKALVRQQLPEKYKEIFFDQSKNGYAGYIDGGASQEEFYKFIKPILEKMDGTEELLVKLNREDLLRKQRTFDNGSIPHQIHLGELHAILRRQEDFYPFLKDNREKIEKILTFRIPYYVGPLARGNSRFAWMTRKSEETITPWNFEEVVDKGASAQSFIERMTNFDKNLPNEKVLPKHSLLYEYFTVYNELTKVKYVTEGMRKPAFLSGEQKKAIVDLLFKTNRKVTVKQLKEDYFKKIECFDSVEISGVEDRFNASLGTYHDLLKIIKDKDFLDNEENEDILEDIVLTLTLFEDREMIEERLKTYAHLFDDKVMKQLKRRRYTGWGRLSRKLINGIRDKQSGKTILDFLKSDGFANRNFMQLIHDDSLTFKEDIQKAQVSGQGDSLHEHIANLAGSPAIKKGILQTVKVVDELVKVMGRHKPENIVIEMARENQTTQKGQKNSRERMKRIEEGIKELGSQILKEHPVENTQLQNEKLYLYYLQNGRDMYVDQELDINRLSDYDVDHIVPQSFLKDDSIDNKVLTRSDKNRGKSDNVPSEEVVKKMKNYWRQLLNAKLITQRKFDNLTKAERGGLSELDKAGFIKRQLVETRQITKHVAQILDSRMNTKYDENDKLIREVKVITLKSKLVSDFRKDFQFYKVREINNYHHAHDAYLNAVVGTALIKKYPKLESEFVYGDYKVYDVRKMIAKSEQEIGKATAKYFFYSNIMNFFKTEITLANGEIRKRPLIETNGETGEIVWDKGRDFATVRKVLSMPQVNIVKKTEVQTGGFSKESILPKRNSDKLIARKKDWDPKKYGGFDSPTVAYSVLVVAKVEKGKSKKLKSVKELLGITIMERSSFEKNPIDFLEAKGYKEVKKDLIIKLPKYSLFELENGRKRMLASAGELQKGNELALPSKYVNFLYLASHYEKLKGSPEDNEQKQLFVEQHKHYLDEIIEQISEFSKRVILADANLDKVLSAYNKHRDKPIREQAENIIHLFTLTNLGAPAAFKYFDTTIDRKRYTSTKEVLDATLIHQSITGLYETRIDLSQLGGDSGGSGGSGGSTNLSDIIEKETGKQLVIQESILMLPEEVEEVIGNKPESDILVHTAYDESTDENVMLLTSDAPEYKPWALVIQDSNGENKIKMLSGGSKRTADGSEFEPKKKRKV

SEQ ID NO: 543 - protein, 1699 aa, synthetic construct
MKRTADGSEFESPKKKRKVSSEVEFSHEYWMRHALTLAKRARDEGEGPVGAVLVLNNRVIGEGWNRRIGLHDPTAHAEIMALRQGGLVMQNCKLIDATLYVTFEPCVMCAGAMIHSRIGRVVFGVRNSKRGAAGSLMNVLNYPGMNHRVEITEGILADECAALLCDFYRMPRQVFNAQKKAQSSINSGGSSGGSSGSETPGTSESATPESSGGSSGGSDKKYSIGLAIGTNSVGWAVITDEYKVPSKKFKVLGNTDRHSIKKNLIGALLFDSGETAEATRLKRTARRRYTRRKNRICYLQEIFSNEMAKVDDSFFHRLEESFLVEEDKKHERHPIFGNIVDEVAYHEKYPTIYHLRKKLVDSTDKADLRLIYLALAHMIKFRGHFLIEGDLNPDNSDVDKLFIQLVQTYNQLFEENPINASGVDAKAILSARLSKSRRLENLIAQLPGEKKNGLFGNLIALSLGLTPNFKSNFDLAEDAKLQLSKDTYDDDLDNLLAQIGDQYADLFLAAKNLSDAILLSDILRVNTEITKAPLSASMIKRYDEHHQDLTLLKALVRQQLPEKYKEIFFDQSKNGYAGYIDGGASQEEFYKFIKPILEKMDGTEELLVKLNREDLLRKQRTFDNGSIPHQIHLGELHAILRRQEDFYPFLKDNREKIEKILTFRIPYYVGPLARGNSRFAWMTRKSEETITPWNFEEVVDKGASAQSFIERMTNFDKNLPNEKVLPKHSLLYEYFTVYNELTKVKYVTEGMRKPAFLSGEQKKAIVDLLFKTNRKVTVKQLKEDYFKKIECFDSVEISGVEDRFNASLGTYHDLLKIIKDKDFLDNEENEDILEDIVLTLTLFEDREMIEERLKTYAHLFDDKVMKQLKRRRYTGWGRLSRKLINGIRDKQSGKTILDFLKSDGFANRNFMQLIHDDSLTFKEDIQKAQVSGQGDSLHEHIANLAGSPAIKKGILQTVKVVDELVKVMGRHKPENIVIEMARENQTTQKGQKNSRERMKRIEEGIKELGSQILKEHPVENTQLQNEKLYLYYLQNGRDMYVDQELDINRLSDYDVDHIVPQSFLKDDSIDNKVLTRSDKNRGKSDNVPSEEVVKKMKNYWRQLLNAKLITQRKFDNLTKAERGGLSELDKAGFIKRQLVETRQITKHVAQILDSRMNTKYDENDKLIREVKVITLKSKLVSDFRKDFQFYKVREINNYHHAHDAYLNAVVGTALIKKYPKLESEFVYGDYKVYDVRKMIAKSEQEIGKATAKYFFYSNIMNFFKTEITLANGEIRKRPLIETNGETGEIVWDKGRDFATVRKVLSMPQVNIVKKTEVQTGGFSKESILPKRNSDKLIARKKDWDPKKYGGFDSPTVAYSVLVVAKVEKGKSKKLKSVKELLGITIMERSSFEKNPIDFLEAKGYKEVKKDLIIKLPKYSLFELENGRKRMLASAGELQKGNELALPSKYVNFLYLASHYEKLKGSPEDNEQKQLFVEQHKHYLDEIIEQISEFSKRVILADANLDKVLSAYNKHRDKPIREQAENIIHLFTLTNLGAPAAFKYFDTTIDRKRYTSTKEVLDATLIHQSITGLYETRIDLSQLGGDSGGSGGSGGSTNLSDIIEKETGKQLVIQESILMLPEEVEEVIGNKPESDILVHTAYDESTDENVMLLTSDAPEYKPWALVIQDSNGENKIKMLSGGSKRTADGSEFEPKKKRKV

SEQ ID NO: 544 - protein, 1505 aa, synthetic construct
MKRTADGSEFESPKKKRKVSSEVEFSHEYWMRHALTLAKRARDEGAGPVGAVLVLNNRVIGEGWNRAIGLHDPTAHAEIMALRQGGLVMQNYRLFDATLYVTFEPCVMCAGAMINSRIGRVVFGVRNSKRGAAGSLMNVLNYPGMNHRVEITEGILADECAALLCDFYRMPRQVFNSQKKAQSSINSGGSSGGSSGSETPGTSESATPESSGGSSGGSAAFKPNPINYILGLAIGIASVGWAMVEIDEEGNPIRLIDLGVRVFERAEVPKTGDSLAMARRLARSVRRLTRRRAHRLLRARRLLKREGVLQAADFDENGLITSLPNTPWQLRAAALDRKLTPLEWSAVLLHLIKHRGYLSQRKNEGETAAKELGALLKGVANNAHALQTGDFRTPAELALNKFEKESGHIRNQRGDYSHTFSRKDLQAELILLFEKQKEFGNPHVSGGLKEGIETLLMTQRPALSGDAVQKMLGHCTLEPTEPKAAKNTYTAERFIWLTKLNNLRILEQGSERPLTDTERSTLMDEPYRKSKLTYAQARKLLGLEDTAFFKGLRYGKDNAEASTLMEMKAYHAISRALEKEGLKDKKSPLNLSSELQDEIGTAFSLFKTDEDITGRLKDRVQPEILEALLKHISFDKFVQISLKALRRIVPLMEQGKRYDEACAEIYGVHYGKKNTEEKIYLPPIPADEIRNPVVLRALSQARKVINGVVRRYGSPARIHIETAREVGKSFKDRKEIAKRQEENRKDREKAAAKFREYFPNFVGEPKSKDILKLRLYEQQHGKCLYSGKEINLVRLNEKGYVEIDHALPFSRTWDDSFNNKVLVLGSENQNKGNQTPYEYFNGKDNSREWQEFKARVETSRFPSSKKQRILLQKFDEDGFKECNLNDTRYVNRFLCQFVADHILLTGKGKRRVVASNGQITNLLRGFWRLRKVRAENDRHHALDAVVVACSTVAMQQKITRFVRYKEMNAFDGKTVDKETGKVLYQKTHFPQPWEFFAQEVMIRVFGKPDGKPEFEEADTPEKLRTLLAEKLSSRPEAVHEYVTPLFVSRAPNRKMSGAHKDTLRSAKRFVKHNEKISVKRVWLTEIKLADLENMVNYKNGREIELYEALKARLEAYGGNAKQAFDPKDNPFYKKGGQLVKAVRVEKTQKSGVLLNKKNAYTIADNGDMVRVDVFCKVDKKGKNQYFIVPIYAWQVAENILPDIDCKGYRIDDSYTFCFSLHKYDLIAFQKDEKSKVEFAYYINCDSSSGGFYLAWHDKGSREQRFRISTQNLALIQKYQVNELGKEIRPCRLKKRPPVSGGSGGSGGSTNLSDIIEKETGKQLVIQESILMLPEEVEEVIGNKPESDILVHTAYDESTDENVMLLTSDAPEYKPWALVIQDSNGENKIKMLSGGSGGSGGSTNLSDIIEKETGKQLVIQESILMLPEEVEEVIGNKPESDILVHTAYDESTDENVMLLTSDAPEYKPWALVIQDSNGENKIKMLSGGSKRTADGSEFEPKKKRKV

SEQ ID NO: 545 - protein, 1478 aa, synthetic construct
MKRTADGSEFESPKKKRKVSSEVEFSHEYWMRHALTLAKRARDEGAGPVGAVLVLNNRVIGEGWNRAIGLHDPTAHAEIMALRQGGLVMQNYRLFDATLYVTFEPCVMCAGAMINSRIGRVVFGVRNSKRGAAGSLMNVLNYPGMNHRVEITEGILADECAALLCDFYRMPRQVFNSQKKAQSSINSGGSSGGSSGSETPGTSESATPESSGGSSGGSGKRNYILGLAIGITSVGYGIIDYETRDVIDAGVRLFKEANVENNEGRRSKRGARRLKRRRRHRIQRVKKLLFDYNLLTDHSELSGINPYEARVKGLSQKLSEEEFSAALLHLAKRRGVHNVNEVEEDTGNELSTKEQISRNSKALEEKYVAELQLERLKKDGEVRGSINRFKTSDYVKEAKQLLKVQKAYHQLDQSFIDTYIDLLETRRTYYEGPGEGSPFGWKDIKEWYEMLMGHCTYFPEELRSVKYAYNADLYNALNDLNNLVITRDENEKLEYYEKFQIIENVFKQKKKPTLKQIAKEILVNEEDIKGYRVTSTGKPEFTNLKVYHDIKDITARKEIIENAELLDQIAKILTIYQSSEDIQEELTNLNSELTQEEIEQISNLKGYTGTHNLSLKAINLILDELWHTNDNQIAIFNRLKLVPKKVDLSQQKEIPTTLVDDFILSPVVKRSFIQSIKVINAIIKKYGLPNDIIIELAREKNSKDAQKMINEMQKRNRQTNERIEEIIRTTGKENAKYLIEKIKLHDMQEGKCLYSLEAIPLEDLLNNPFNYEVDHIIPRSVSFDNSFNNKVLVKQEENSKKGNRTPFQYLSSSDSKISYETFKKHILNLAKGKGRISKTKKEYLLEERDINRFSVQKDFINRNLVDTRYATRGLMNLLRSYFRVNNLDVKVKSINGGFTSFLRRKWKFKKERNKGYKHHAEDALIIANADFIFKEWKKLDKAKKVMENQMFEEKQAESMPEIETEQEYKEIFITPHQIKHIKDFKDYKYSHRVDKKPNRELINDTLYSTRKDDKGNTLIVNNLNGLYDKDNDKLKKLINKSPEKLLMYHHDPQTYQKLKLIMEQYGDEKNPLYKYYEETGNYLTKYSKKDNGPVIKKIKYYGNKLNAHLDITDDYPNSRNKVVKLSLKPYRFDVYLDNGVYKFVTVKNLDVIKKENYYEVNSKCYEEAKKLKKISNQAEFIASFYNNDLIKINGELYRVIGVNNDLLNRIEVNMIDITYREYLENMNDKRPPRIIKTIASKTQSIKKYSTDILGNLYEVKSKKHPQIIKKGSGGSGGSGGSTNLSDIIEKETGKQLVIQESILMLPEEVEEVIGNKPESDILVHTAYDESTDENVMLLTSDAPEYKPWALVIQDSNGENKIKMLSGGSGGSGGSTNLSDIIEKETGKQLVIQESILMLPEEVEEVIGNKPESDILVHTAYDESTDENVMLLTSDAPEYKPWALVIQDSNGENKIKMLSGGSKRTADGSEFEPKKKRKV

SEQ ID NO: 546 - protein, 1792 aa, synthetic construct
MKRTADGSEFESPKKKRKVSSEVEFSHEYWMRHALTLAKRARDEGAGPVGAVLVLNNRVIGEGWNRAIGLHDPTAHAEIMALRQGGLVMQNYRLFDATLYVTFEPCVMCAGAMINSRIGRVVFGVRNSKRGAAGSLMNVLNYPGMNHRVEITEGILADECAALLCDFYRMPRQVFNSQKKAQSSINSGGSSGGSSGSETPGTSESATPESSGGSSGGSDKKYSIGLAIGTNSVGWAVITDEYKVPSKKFKVLGNTDRHSIKKNLIGALLFDSGETAEATRLKRTARRRYTRRKNRICYLQEIFSNEMAKVDDSFFHRLEESFLVEEDKKHERHPIFGNIVDEVAYHEKYPTIYHLRKKLVDSTDKADLRLIYLALAHMIKFRGHFLIEGDLNPDNSDVDKLFIQLVQTYNQLFEENPINASGVDAKAILSARLSKSRRLENLIAQLPGEKKNGLFGNLIALSLGLTPNFKSNFDLAEDAKLQLSKDTYDDDLDNLLAQIGDQYADLFLAAKNLSDAILLSDILRVNTEITKAPLSASMIKRYDEHHQDLTLLKALVRQQLPEKYKEIFFDQSKNGYAGYIDGGASQEEFYKFIKPILEKMDGTEELLVKLNREDLLRKQRTFDNGSIPHQIHLGELHAILRRQEDFYPFLKDNREKIEKILTFRIPYYVGPLARGNSRFAWMTRKSEETITPWNFEEVVDKGASAQSFIERMTNFDKNLPNEKVLPKHSLLYEYFTVYNELTKVKYVTEGMRKPAFLSGEQKKAIVDLLFKTNRKVTVKQLKEDYFKKIECFDSVEISGVEDRFNASLGTYHDLLKIIKDKDFLDNEENEDILEDIVLTLTLFEDREMIEERLKTYAHLFDDKVMKQLKRRRYTGWGRLSRKLINGIRDKQSGKTILDFLKSDGFANRNFMQLIHDDSLTFKEDIQKAQVSGQGDSLHEHIANLAGSPAIKKGILQTVKVVDELVKVMGRHKPENIVIEMARENQTTQKGQKNSRERMKRIEEGIKELGSQILKEHPVENTQLQNEKLYLYYLQNGRDMYVDQELDINRLSDYDVDHIVPQSFLKDDSIDNKVLTRSDKNRGKSDNVPSEEVVKKMKNYWRQLLNAKLITQRKFDNLTKAERGGLSELDKAGFIKRQLVETRQITKHVAQILDSRMNTKYDENDKLIREVKVITLKSKLVSDFRKDFQFYKVREINNYHHAHDAYLNAVVGTALIKKYPKLESEFVYGDYKVYDVRKMIAKSEQEIGKATAKYFFYSNIMNFFKTEITLANGEIRKRPLIETNGETGEIVWDKGRDFATVRKVLSMPQVNIVKKTEVQTGGFSKESIRPKRNSDKLIARKKDWDPKKYGGFVSPTVAYSVLVVAKVEKGKSKKLKSVKELLGITIMERSSFEKNPIDFLEAKGYKEVKKDLIIKLPKYSLFELENGRKRMLASARFLQKGNELALPSKYVNFLYLASHYEKLKGSPEDNEQKQLFVEQHKHYLDEIIEQISEFSKRVILADANLDKVLSAYNKHRDKPIREQAENIIHLFTLTNLGAPRAFKYFDTTIDRKVYRSTKEVLDATLIHQSITGLYETRIDLSQLGGDSGGSGGSGGSTNLSDIIEKETGKQLVIQESILMLPEEVEEVIGNKPESDILVHTAYDESTDENVMLLTSDAPEYKPWALVIQDSNGENKIKMLSGGSGGSGGSTNLSDIIEKETGKQLVIQESILMLPEEVEEVIGNKPESDILVHTAYDESTDENVMLLTSDAPEYKPWALVIQDSNGENKIKMLSGGSKRTADGSEFEPKKKRKV

SEQ ID NO: 547 - protein, 1315 aa, synthetic construct
MKRTADGSEFESPKKKRKVSSEVEFSHEYWMRHALTLAKRARDEGAGPVGAVLVLNNRVIGEGWNRAIGLHDPTAHAEIMALRQGGLVMQNYRLFDATLYVTFEPCVMCAGAMINSRIGRVVFGVRNSKRGAAGSLMNVLNYPGMNHRVEITEGILADECAALLCDFYRMPRQVFNSQKKAQSSINSGGSSGGSSGSETPGTSESATPESSGGSSGGSARILAFAIGISSIGWAFSENDELKDCGVRIFTKVENPKTGESLALPRRLARSARKRYARRKARLNHLKHLIANEFKLNYEDYQSFDESLAKAYKGSLISPYELRFRALNELLSKQDFARVILHIAKRRGYDDIKNSDDKEKGAILKAIKQNEEKLANYQSVGEYLYKEYFQKFKENSKEFTNVRNKKESYERCIAQSFLKDELKLIFKKQREFGFSFSKKFEEEVLSVAFYKRALKDFSHLVGNCSFFTDEKRAPKNSPLAFMFVALTRIINLLNNLKNTEGILYTKDDLNALLNEVLKNGTLTYKQTKKLLGLSDDYEFKGEKGTYFIEFKKYKEFIKALGEHNLSQDDLNEIAKDITLIKDEIKLKKALAKYDLNQNQIDSLSKLEFKDHLNISFKALKLVTPLMLEGKKYDEACNELNLKVAINEDKKDFLPAFNETYYKDEVTNPVVLRAIKEYRKVLNALLKKYGKVHKINIELAREVGKNHSQRAKIEKEQNENYKAKKDAELECEKLGLKINSKNILKLRLFKEQKEFCAYSGEKIKISDLQDEKMLEIDHIYPYSRSFDDSYMNKVLVFTKQNQEKLNQTPFEAFGNDSAKWQKIEVLAKNLPTKKQKRILDKNYKDKEQKNFKDRNLNDTRYIARLVLNYTKDYLDFLPLSDDENTKLNDTQKGSKVHVEAKSGMLTSALRHTWGFSAKDRNNHLHHAIDAVIIAYANNSIVKAFSDFKKEQESNSAELYAKKISELDYKNKRKFFEPFSGFRQKVLDKIDEIFVSKPERKKPSGALHEETFRKEEEFYQSYGGKEGVLKALELGKIRKVNGKIVKNGDMFRVDIFKHKKTNKFYAVPIYTMDFALKVLPNKAVARSKKGEIKDWILMDENYEFCFSLYKDSLILIQTKKMQEPEFVYYNAFTSSTVSLIVSKHDNKFETLSKNQKILFKNANEKEVIAKSIGIQNLKVFEKYIVSALGEVTKAEFRQREDFKKSGGSGGSGGSTNLSDIIEKETGKQLVIQESILMLPEEVEEVIGNKPESDILVHTAYDESTDENVMLLTSDAPEYKPWALVIQDSNGENKIKMLSGGSKRTADGSEFEPKKKRKV

SEQ ID NO: 548 - DNA, 7917 bp, synthetic construct
  source 1..7917: mol_type = other DNA
tagttattaatagtaatcaattacggggtcattagttcatagcccatatatggagttccgcgttacataacttacggtaaatggcccgcctggctgaccgcccaacgacccccgcccattgacgtcaataatgacgtatgttcccatagtaacgccaatagggactttccattgacgtcaatgggtggagtatttacggtaaactgcccacttggcagtacatcaagtgtatcatatgccaagtacgccccctattgacgtcaatgacggtaaatggcccgcctggcattatgcccagtacatgaccttatgggactttcctacttggcagtacatctacgtattagtcatcgctattaccatggtgatgcggttttggcagtacatcaatgggcgtggatagcggtttgactcacggggatttccaagtctccaccccattgacgtcaatgggagtttgttttggcaccaaaatcaacgggactttccaaaatgtcgtaacaactccgccccattgacgcaaatgggcggtaggcgtgtacggtgggaggtctatataagcagagctggtttagtgaaccgtcagatccgctagagatccgcggccgctaatacgactcactatagggagagccgccaccatgaaacggacagccgacggaagcgagttcgagtcaccaaagaagaagcggaaagtcagttctgaggtggagttttcccacgagtactggatgagacatgccctgaccctggccaagagggcacgggatgagggggcgggtcctgtgggagccgtgctggtgctgaacaatagagtgatcggcgagggctggaacagagccatcggcctgcacgacccaacagcccatgccgaaattatggccctgagacagggcggcctggtcatgcagaactacagactgtttgacgccaccctgtacgtgacattcgagccttgcgtgatgtgcgccggcgccatgatcaactctaggatcggccgcgtggtgtttggcgtgaggaactcaaaaagaggcgccgcaggctccctgatgaacgtgctgaactaccccggcatgaatcaccgcgtcgaaattaccgagggaatcctggcagatgaatgtgccgccctgctgtgcgatttctatcggatgcctagacaggtgttcaattctcagaagaaggcccagagctccatcaactctggcggatctagcggaggatcctctggcagcgagacaccaggaacaagcgagtcagcaacaccagagagcagtggcggcagcagcggcggcagcgcagcattcaagcctaacccaatcaattacatcctgggactggcaatcggaatcgcatccgtgggatgggctatggtggagatcgacgaggaggggaatcctatccggctgatcgatctgggcgtgagagtgtttgagagggccgaggtgccaaagaccggcgattctctggctatggcccggagactggcacggagcgtgaggcgcctgacacggagaagggcacacaggctgctgagggcacgccggctgctgaagagagagggcgtgctgcaggcagcagacttcgatgagaatggcctgatcacgagcttgccaaacaccccctggcagctgagagcagccgccctggacaggaagctgacaccactggagtggtctgccgtgctgctgcacctgatcaagcaccgcggctacctgagccagcggaagaacgagggagagacagcagccaaggagctgggcgccctgctgaagggagtggccaacaatgcccacgccctgcagaccggcgatttcaggacacctgccgagctggccctgaataagtttgagaaggagtccggccacatcagaaaccagaggggcgactatagccacaccttctcccgcaaggatctgcaggccgagctgatcctgctgttcgagaagcagaaggagtttggcaatccacacgtgagcggaggcctgaaggagggaatcgagaccctgctgatgacacagaggcctgccctgtccggcgacgcagtgcagaagatgctggggcactgcaccctcgagcctacagagccaaaggccgccaagaacacctacacagccgagcggtttatctggctgacaaagctgaacaatctgagaatcctggagcagggatccgagaggccactgaccgacacagagaggtccaccctgatggatgagccttaccggaagtctaaactgacatatgcccaggccagaaagctgctgggcctggaggacaccgccttctttaagggcctgagatacggcaaggataatgccgaggcctccacactgatggagatgaaggcctatcacgccatctctcgcgccctggagaaggagggcctgaaggacaagaagtcccccctgaacctgagctccgagctgcaggatgagatcggcaccgccttctctctgtttaagaccgacgaggatatcacaggccgcctgaaggacagggtgcagcctgagatcctggaggccctgctgaagcacatctctttcgataagtttgtgcagatcagcctgaaggccctgagaaggatcgtgccactgatggagcagggcaagcggtacgacgaggcctgcgccgagatctacggcgttcactatggcaagaagaacacagaggagaagatctatctgccccctatccctgccgacgagatcagaaatcctgtggtgctgagggccctgtcccaggcaagaaaagtgatcaacggagtggtgcgccggtacggatctccagcccggatccacatcgagaccgccagagaagtgggcaagagcttcaaggaccggaaggagatcgcgaagagacaggaggagaatcgcaaggatcgggagaaggccgccgccaagtttagggagtacttccctaactttgtgggcgagccaaagtctaaggacatcctgaagctgcgcctgtacgagcagcagcacggcaagtgtctgtatagcggcaaagagatcaatctggtgcggctgaacgagaagggctatgtggagatcgatcacgccctgcctttctccagaacctgggacgattcttttaacaataaggtgctggtgctgggcagcgagaaccagaataagggcaatcagacaccatacgagtatttcaatggcaaggacaactccagggagtggcaggagttcaaggcccgcgtggagacctctagatttcccagtagcaagaagcagcggatcctgctgcagaagttcgacgaggatggctttaaggagtgcaacctgaatgacaccagatacgtgaaccggttcctgtgccagtttgtggccgatcacatcctgctgaccggcaagggcaagagaagggtggtcgcctctaatggccagatcacaaacctgctgagggggttttggagactgaggaaggtgcgggcagagaatgacagacaccacgcactggatgcagtggtggtggcatgcagcaccgtggcaatgcagcagaagatcacaagattcgtgaggtataaggagatgaacgcctttgacggcaagaccgtcgataaggagacaggcaaggtgctgtaccagaagacccacttcccccagccttgggagttctttgcccaggaagttatgatccgggtgttcggcaagccagacggcaagcctgagtttgaggaggccgataccccagagaagctgaggacactgctggcagagaagctgtctagcaggccagaggcagtgcacgagtacgtgaccccgctgttcgtgtccagggcacccaatcggaagatgtctggcgcccacaaggacacactgagaagcgccaagaggtttgtgaagcacaacgagaagatctccgtgaagagagtgtggctgaccgagatcaagctggccgatctggagaacatggtgaattacaagaacggcagggagatcgagctgtatgaggccctgaaggcaaggctggaggcctacggaggaaatgccaagcaggccttcgacccaaaggataaccccttttataagaagggaggacagctggtgaaggccgtgcgggtggagaagacccagaaaagcggcgtgctgctgaataagaagaacgcctacacaatcgccgacaatggtgatatggtgagagtggacgtgttctgtaaggtggataagaagggcaagaatcagtactttatcgtgcctatctatgcctggcaggtggccgagaacatcctgccagacatcgattgcaagggctacagaatcgacgatagctatacattctgtttttccctgcacaagtatgacctgatcgccttccagaaggatgagaagtccaaggtggagtttgcctactatatcaattgcgactcctctagcggcgggttctacctggcctggcacgataagggcagcagggagcagcggtttcgcatctccacccagaatctggcgctgatccagaagtatcaggtgaacgagctgggcaaggagatcaggccatgtcggctgaagaagcgcccacccgtgagcggcgggagcggcgggagcggggggagcactaatctgagcgacatcattgagaaggagactgggaaacagctggtcattcaggagtccatcctgatgctgcctgaggaggtggaggaagtgatcggcaacaagccagagtctgacatcctggtgcacaccgcctacgacgagtccacagatgagaatgtgatgctgctgacctctgacgcccccgagtataagccttgggccctggtcatccaggattctaacggcgagaataagatcaagatgctgagcggaggatccggaggatctggaggcagcaccaacctgtctgacatcatcgagaaggagacaggcaagcagctggtcatccaggagagcatcctgatgctgcccgaagaagtcgaagaagtgatcggaaacaagcctgagagcgatatcctggtccataccgcctacgacgagagtaccgacgaaaatgtgatgctgctgacatccgacgccccagagtataagccctgggctctggtcatccaggattccaacggagagaacaaaatcaaaatgctgtctggcggctcaaaaagaaccgccgacggcagcgaattcgagcccaagaagaagaggaaagtctaaccggtcatcatcaccatcaccattgagtttaaacccgctgatcagcctcgactgtgccttctagttgccagccatctgttgtttgcccctcccccgtgccttccttgaccctggaaggtgccactcccactgtcctttcctaataaaatgaggaaattgcatcgcattgtctgagtaggtgtcattctattctggggggtggggtggggcaggacagcaagggggaggattgggaagacaatagcaggcatgctggggatgcggtgggctctatggcttctgaggcggaaagaaccagctggggctcgataccgtcgacctctagctagagcttggcgtaatcatggtcatagctgtttcctgtgtgaaattgttatccgctcacaattccacacaacatacgagccggaagcataaagtgtaaagcctagggtgcctaatgagtgagctaactcacattaattgcgttgcgctcactgcccgctttccagtcgggaaacctgtcgtgccagctgcattaatgaatcggccaacgcgcggggagaggcggtttgcgtattgggcgcacttccgcttcctcgctcactgactcgctgcgctcggtcgttcggctgcggcgagcggtatcagctcactcaaaggcggtaatacggttatccacagaatcaggggataacgcaggaaagaacatgtgagcaaaaggccagcaaaaggccaggaaccgtaaaaaggccgcgttgctggcgtttttccataggctccgcccccctgacgagcatcacaaaaatcgacgctcaagtcagaggtggcgaaacccgacaggactataaagataccaggcgtttccccctggaagctccctcgtgcgctctcctgttccgaccctgccgcttaccggatacctgtccgcctttctcccttcgggaagcgtggcgctttctcatagctcacgctgtaggtatctcagttcggtgtaggtcgttcgctccaagctgggctgtgtgcacgaaccccccgttcagcccgaccgctgcgccttatccggtaactatcgtcttgagtccaacccggtaagacacgacttatcgccactggcagcagccactggtaacaggattagcagagcgaggtatgtaggcggtgctacagagttcttgaagtggtggcctaactacggctacactagaagaacagtatttggtatctgcgctctgctgaagccagttaccttcggaaaaagagttggtagctcttgatccggcaaacaaaccaccgctggtagcggtggtttttttgtttgcaagcagcagattacgcgcagaaaaaaaggatctcaagaagatcctttgatcttttctacggggtctgacactcagtggaacgaaaactcacgttaagggattttggtcatgagattatcaaaaaggatcttcacctagatccttttaaattaaaaatgaagttttaaatcaatctaaagtatatatgagtaaacttggtctgacagttaccaatgcttaatcagtgaggcacctatctcagcgatctgtctatttcgttcatccatagttgcctgactccccgtcgtgtagataactacgatacgggagggcttaccatctggccccagtgctgcaatgataccgcgggacccacgctcaccggctccagatttatcagcaataaaccagccagccggaagggccgagcgcagaagtggtcctgcaactttatccgcctccatccagtctattaattgttgccgggaagctagagtaagtagttcgccagttaatagtttgcgcaacgttgttgccattgctacaggcatcgtggtgtcacgctcgtcgtttggtatggcttcattcagctccggttcccaacgatcaaggcgagttacatgatcccccatgttgtgcaaaaaagcggttagctccttcggtcctccgatcgttgtcagaagtaagttggccgcagtgttatcactcatggttatggcagcactgcataattctcttactgtcatgccatccgtaagatgcttttctgtgactggtgagtactcaaccaagtcattctgagaatagtgtatgcggcgaccgagttgctcttgcccggcgtcaatacgggataataccgcgccacatagcagaactttaaaagtgctcatcattggaaaacgttcttcggggcgaaaactctcaaggatcttaccgctgttgagatccagttcgatgtaacccactcgtgcacccaactgatcttcagcatcttttactttcaccagcgtttctgggtgagcaaaaacaggaaggcaaaatgccgcaaaaaagggaataagggcgacacggaaatgttgaatactcatactcttcctttttcaatattattgaagcatttatcagggttattgtctcatgagcggatacatatttgaatgtatttagaaaaataaacaaataggggttccgcgcacatttccccgaaaagtgccacctgacgtcgacggatcgggagatcgatctcccgatcccctagggtcgactctcagtacaatctgctctgatgccgcatagttaagccagtatctgctccctgcttgtgtgttggaggtcgctgagtagtgcgcgagcaaaatttaagctacaacaaggcaaggcttgaccgacaattgcatgaagaatctgcttagggttaggcgttttgcgctgcttcgcgatgtacgggccagatatacgcgttgacattgattattgac

SEQ ID NO: 549 - DNA, 7347 bp, synthetic construct
  source 1..7347: mol_type = other DNA
attgatgcagtaatcatagcctacgctaacaacagcatcgtgaaagccttctccgatttcaagaaagaacaggagtctaatagcgccgagttgtacgccaagaaaatttccgaattggactataaaaataagagaaaattcttcgaacccttctccgggtttcgccaaaaggtcttagataagatcgacgagattttcgtttccaagcccgaaagaaaaaagccttcaggggcactgcacgaagagacattccgcaaggaagaggaattttaccaatcttacggtggtaaagagggagttctgaaggctctggagcttgggaagatccgcaaggtaaacgggaaaatcgtgaaaaacggggacatgttcagggtggatatcttcaagcacaaaaagaccaacaagttctacgcagtacccatctacactatggatttcgctttaaaggttctcccaaataaggcggtggctcgatcgaagaaaggagagatcaaggactggatcttaatggatgaaaattacgagttttgcttctcgctctacaaagatagcctgattctgatccagacaaaaaagatgcaggaaccagaatttgtttattataacgccttcacgagcagtacagtgtccctgattgtgagcaagcatgataacaagttcgagactctgtctaagaatcagaaaatccttttcaagaacgccaacgagaaggaggtcatcgcaaagtcaattggcatccaaaacctgaaggtgttcgagaaatacatagtgtccgcactcggtgaagtaactaaagccgaatttcgacagcgcgaggattttaagaaaagcggcgggagcggcgggagcggggggagcactaatctgagcgacatcattgagaaggagactgggaaacagctggtcattcaggagtccatcctgatgctgcctgaggaggtggaggaagtgatcggcaacaagccagagtctgacatcctggtgcacaccgcctacgacgagtccacagatgagaatgtgatgctgctgacctctgacgcccccgagtataagccttgggccctggtcatccaggattctaacggcgagaataagatcaagatgctgagcggaggatccaaaagaaccgccgacggcagcgaattcgagcccaagaagaagaggaaagtctaaccggtcatcatcaccatcaccattgagtttaaacccgctgatcagcctcgactgtgccttctagttgccagccatctgttgtttgcccctcccccgtgccttccttgaccctggaaggtgccactcccactgtcctttcctaataaaatgaggaaattgcatcgcattgtctgagtaggtgtcattctattctggggggtggggtggggcaggacagcaagggggaggattgggaagacaatagcaggcatgctggggatgcggtgggctctatggcttctgaggcggaaagaaccagctggggctcgataccgtcgacctctagctagagcttggcgtaatcatggtcatagctgtttcctgtgtgaaattgttatccgctcacaattccacacaacatacgagccggaagcataaagtgtaaagcctagggtgcctaatgagtgagctaactcacattaattgcgttgcgctcactgcccgctttccagtcgggaaacctgtcgtgccagctgcattaatgaatcggccaacgcgcggggagaggcggtttgcgtattgggcgcacttccgcttcctcgctcactgactcgctgcgctcggtcgttcggctgcggcgagcggtatcagctcactcaaaggcggtaatacggttatccacagaatcaggggataacgcaggaaagaacatgtgagcaaaaggccagcaaaaggccaggaaccgtaaaaaggccgcgttgctggcgtttttccataggctccgcccccctgacgagcatcacaaaaatcgacgctcaagtcagaggtggcgaaacccgacaggactataaagataccaggcgtttccccctggaagctccctcgtgcgctctcctgttccgaccctgccgcttaccggatacctgtccgcctttctcccttcgggaagcgtggcgctttctcatagctcacgctgtaggtatctcagttcggtgtaggtcgttcgctccaagctgggctgtgtgcacgaaccccccgttcagcccgaccgctgcgccttatccggtaactatcgtcttgagtccaacccggtaagacacgacttatcgccactggcagcagccactggtaacaggattagcagagcgaggtatgtaggcggtgctacagagttcttgaagtggtggcctaactacggctacactagaagaacagtatttggtatctgcgctctgctgaagccagttaccttcggaaaaagagttggtagctcttgatccggcaaacaaaccaccgctggtagcggtggtttttttgtttgcaagcagcagattacgcgcagaaaaaaaggatctcaagaagatcctttgatcttttctacggggtctgacactcagtggaacgaaaactcacgttaagggattttggtcatgagattatcaaaaaggatcttcacctagatccttttaaattaaaaatgaagttttaaatcaatctaaagtatatatgagtaaacttggtctgacagttaccaatgcttaatcagtgaggcacctatctcagcgatctgtctatttcgttcatccatagttgcctgactccccgtcgtgtagataactacgatacgggagggcttaccatctggccccagtgctgcaatgataccgcgggacccacgctcaccggctccagatttatcagcaataaaccagccagccggaagggccgagcgcagaagtggtcctgcaactttatccgcctccatccagtctattaattgttgccgggaagctagagtaagtagttcgccagttaatagtttgcgcaacgttgttgccattgctacaggcatcgtggtgtcacgctcgtcgtttggtatggcttcattcagctccggttcccaacgatcaaggcgagttacatgatcccccatgttgtgcaaaaaagcggttagctccttcggtcctccgatcgttgtcagaagtaagttggccgcagtgttatcactcatggttatggcagcactgcataattctcttactgtcatgccatccgtaagatgcttttctgtgactggtgagtactcaaccaagtcattctgagaatagtgtatgcggcgaccgagttgctcttgcccggcgtcaatacgggataataccgcgccacatagcagaactttaaaagtgctcatcattggaaaacgttcttcggggcgaaaactctcaaggatcttaccgctgttgagatccagttcgatgtaacccactcgtgcacccaactgatcttcagcatcttttactttcaccagcgtttctgggtgagcaaaaacaggaaggcaaaatgccgcaaaaaagggaataagggcgacacggaaatgttgaatactcatactcttcctttttcaatattattgaagcatttatcagggttattgtctcatgagcggatacatatttgaatgtatttagaaaaataaacaaataggggttccgcgcacatttccccgaaaagtgccacctgacgtcgacggatcgggagatcgatctcccgatcccctagggtcgactctcagtacaatctgctctgatgccgcatagttaagccagtatctgctccctgcttgtgtgttggaggtcgctgagtagtgcgcgagcaaaatttaagctacaacaaggcaaggcttgaccgacaattgcatgaagaatctgcttagggttaggcgttttgcgctgcttcgcgatgtacgggccagatatacgcgttgacattgattattgactagttattaatagtaatcaattacggggtcattagttcatagcccatatatggagttccgcgttacataacttacggtaaatggcccgcctggctgaccgcccaacgacccccgcccattgacgtcaataatgacgtatgttcccatagtaacgccaatagggactttccattgacgtcaatgggtggagtatttacggtaaactgcccacttggcagtacatcaagtgtatcatatgccaagtacgccccctattgacgtcaatgacggtaaatggcccgcctggcattatgcccagtacatgaccttatgggactttcctacttggcagtacatctacgtattagtcatcgctattaccatggtgatgcggttttggcagtacatcaatgggcgtggatagcggtttgactcacggggatttccaagtctccaccccattgacgtcaatgggagtttgttttggcaccaaaatcaacgggactttccaaaatgtcgtaacaactccgccccattgacgcaaatgggcggtaggcgtgtacggtgggaggtctatataagcagagctggtttagtgaaccgtcagatccgctagagatccgcggccgctaatacgactcactatagggagagccgccaccatgaaacggacagccgacggaagcgagttcgagtcaccaaagaagaagcggaaagtcagttctgaggtggagttttcccacgagtactggatgagacatgccctgaccctggccaagagggcacgggatgagggggcgggtcctgtgggagccgtgctggtgctgaacaatagagtgatcggcgagggctggaacagagccatcggcctgcacgacccaacagcccatgccgaaattatggccctgagacagggcggcctggtcatgcagaactacagactgtttgacgccaccctgtacgtgacattcgagccttgcgtgatgtgcgccggcgccatgatcaactctaggatcggccgcgtggtgtttggcgtgaggaactcaaaaagaggcgccgcaggctccctgatgaacgtgctgaactaccccggcatgaatcaccgcgtcgaaattaccgagggaatcctggcagatgaatgtgccgccctgctgtgcgatttctatcggatgcctagacaggtgttcaattctcagaagaaggcccagagctccatcaactctggcggatctagcggaggatcctctggcagcgagacaccaggaacaagcgagtcagcaacaccagagagcagtggcggcagcagcggcggcagcgcccgcatcctcgctttcgcaatcggaatctctagtatcggatgggccttctctgaaaacgacgaactgaaagactgcggcgtgagaatcttcacaaaggttgaaaaccctaaaacaggcgagtctttagctctgccacgtaggttggcccgctccgcccgaaaaaggtatgctcggcggaaggctcgcctcaaccacttgaagcatttgatagctaatgagttcaaactgaactacgaagattaccagtccttcgacgagtcattggcaaaagcctacaaaggcagccttatcagtccttatgagttgagatttcgcgcactcaacgaactgctttctaagcaagactttgctagggtcattctgcacatcgcaaaacggcgaggttatgacgatatcaagaactccgacgataaagaaaagggagccattctcaaggcgatcaaacagaatgaggaaaaattggcaaactaccagagtgtgggcgagtatctgtataaagagtatttccagaagtttaaggaaaacagcaaggagtttacaaacgtcagaaataaaaaggagtcttacgagagatgcatcgcgcagtcattcctcaaagatgagctgaagctgatatttaagaagcaacgcgaatttggtttctcattctctaagaagttcgaagaggaggttctttccgtggcgttttacaagagggcgctcaaagacttctcccacctggttggtaactgtagtttcttcacggatgagaagcgagctcccaaaaattctcccctggctttcatgtttgttgccctgactcggatcattaacctgctgaacaacctgaaaaatactgaagggatcttgtatacgaaggacgacctaaatgcactcctgaatgaagtgctcaaaaacggaactctaacctataaacagaccaagaaattactggggctctctgacgactacgagttcaagggcgagaagggtacttattttatcgaattcaaaaagtataaggagttcattaaagcattgggggaacacaacctcagccaggacgatctcaatgaaattgccaaggacatcacgctgattaaagacgagataaaactgaaaaaggcactggccaagtatgacctcaaccagaaccagatcgactctctgtccaagctggagttcaaagaccacctaaacatatccttcaaagccctgaaactggtcacccctctaatgctcgaaggaaaaaaatacgacgaggcgtgtaatgaactgaatcttaaggtggccatcaatgaggataagaaggactttcttccagcctttaacgagacatattacaaagacgaggtcacaaacccggttgtgctgagggccataaaagagtatcggaaggttctgaatgccctcctgaagaagtacggcaaagtgcacaaaataaatatcgaattggctagggaggtggggaagaaccattctcagcgagcaaagatcgagaaagagcagaatgagaactacaaagccaagaaagacgccgaactggagtgcgaaaagctggggcttaaaataaacagtaaaaacatcctgaaattaagattgttcaaagagcaaaaggagttttgcgcctactcaggggaaaaaatcaaaatatcagacctgcaggacgagaaaatgctggagatcgaccatatctatccgtatagcaggtcatttgacgattcctacatgaacaaagtgcttgtgtttaccaaacagaaccaagaaaagctgaaccaaaccccctttgaggctttcggaaacgactcagccaagtggcagaaaatcgaagtcctagccaagaatctgcctacaaaaaaacaaaagaggattcttgataagaactataaggacaaggaacagaaaaactttaaagacaggaacctgaatgacacgaggtacattgcgcgactggttctaaactataccaaagactacctggatttcctccctctgagcgacgacgagaatactaaactgaatgatacccagaaaggctcaaaggtccacgttgaggctaagtccgggatgctgactagcgccctccgccacacgtggggcttcagcgccaaagatcggaataatcatcttcatcacgct

SEQ ID NO: 550 - DNA, 8778 bp, synthetic construct
  source 1..8778: mol_type = other DNA
tagttattaatagtaatcaattacggggtcattagttcatagcccatatatggagttccgcgttacataacttacggtaaatggcccgcctggctgaccgcccaacgacccccgcccattgacgtcaataatgacgtatgttcccatagtaacgccaatagggactttccattgacgtcaatgggtggagtatttacggtaaactgcccacttggcagtacatcaagtgtatcatatgccaagtacgccccctattgacgtcaatgacggtaaatggcccgcctggcattatgcccagtacatgaccttatgggactttcctacttggcagtacatctacgtattagtcatcgctattaccatggtgatgcggttttggcagtacatcaatgggcgtggatagcggtttgactcacggggatttccaagtctccaccccattgacgtcaatgggagtttgttttggcaccaaaatcaacgggactttccaaaatgtcgtaacaactccgccccattgacgcaaatgggcggtaggcgtgtacggtgggaggtctatataagcagagctggtttagtgaaccgtcagatccgctagagatccgcggccgctaatacgactcactatagggagagccgccaccatgaaacggacagccgacggaagcgagttcgagtcaccaaagaagaagcggaaagtcagttctgaggtggagttttcccacgagtactggatgagacatgccctgaccctggccaagagggcacgggatgagggggcgggtcctgtgggagccgtgctggtgctgaacaatagagtgatcggcgagggctggaacagagccatcggcctgcacgacccaacagcccatgccgaaattatggccctgagacagggcggcctggtcatgcagaactacagactgtttgacgccaccctgtacgtgacattcgagccttgcgtgatgtgcgccggcgccatgatcaactctaggatcggccgcgtggtgtttggcgtgaggaactcaaaaagaggcgccgcaggctccctgatgaacgtgctgaactaccccggcatgaatcaccgcgtcgaaattaccgagggaatcctggcagatgaatgtgccgccctgctgtgcgatttctatcggatgcctagacaggtgttcaattctcagaagaaggcccagagctccatcaactctggcggatctagcggaggatcctctggcagcgagacaccaggaacaagcgagtcagcaacaccagagagcagtggcggcagcagcggcggcagcgacaagaagtacagcatcggcctggccatcggcaccaactctgtgggctgggccgtgatcaccgacgagtacaaggtgcccagcaagaaattcaaggtgctgggcaacaccgaccggcacagcatcaagaagaacctgatcggagccctgctgttcgacagcggcgaaacagccgaggccacccggctgaagagaaccgccagaagaagatacaccagacggaagaaccggatctgctatctgcaagagatcttcagcaacgagatggccaaggtggacgacagcttcttccacagactggaagagtccttcctggtggaagaggataagaagcacgagcggcaccccatcttcggcaacatcgtggacgaggtggcctaccacgagaagtaccccaccatctaccacctgagaaagaaactggtggacagcaccgacaaggccgacctgcggctgatctatctggccctggcccacatgatcaagttccggggccacttcctgatcgagggcgacctgaaccccgacaacagcgacgtggacaagctgttcatccagctggtgcagacctacaaccagctgttcgaggaaaaccccatcaacgccagcggcgtggacgccaaggccatcctgtctgccagactgagcaagagcagacggctggaaaatctgatcgcccagctgcccggcgagaagaagaatggcctgttcggaaacctgattgccctgagcctgggcctgacccccaacttcaagagcaacttcgacctggccgaggatgccaaactgcagctgagcaaggacacctacgacgacgacctggacaacctgctggcccagatcggcgaccagtacgccgacctgtttctggccgccaagaacctgtccgacgccatcctgctgagcgacatcctgagagtgaacaccgagatcaccaaggcccccctgagcgcctctatgatcaagagatacgacgagcaccaccaggacctgaccctgctgaaagctctcgtgcggcagcagctgcctgagaagtacaaagagattttcttcgaccagagcaagaacggctacgccggctacattgacggcggagccagccaggaagagttctacaagttcatcaagcccatcctggaaaagatggacggcaccgaggaactgctcgtgaagctgaacagagaggacctgctgcggaagcagcggaccttcgacaacggcagcatcccccaccagatccacctgggagagctgcacgccattctgcggcggcaggaagatttttacccattcctgaaggacaaccgggaaaagatcgagaagatcctgaccttccgcatcccctactacgtgggccctctggccaggggaaacagcagattcgcctggatgaccagaaagagcgaggaaaccatcaccccctggaacttcgaggaagtggtggacaagggcgcttccgcccagagcttcatcgagcggatgaccaacttcgataagaacctgcccaacgagaaggtgctgcccaagcacagcctgctgtacgagtacttcaccgtgtataacgagctgaccaaagtgaaatacgtgaccgagggaatgagaaagcccgccttcctgagcggcgagcagaaaaaggccatcgtggacctgctgttcaagaccaaccggaaagtgaccgtgaagcagctgaaagaggactacttcaagaaaatcgagtgcttcgactccgtggaaatctccggcgtggaagatcggttcaacgcctccctgggcacataccacgatctgctgaaaattatcaaggacaaggacttcctggacaatgaggaaaacgaggacattctggaagatatcgtgctgaccctgacactgtttgaggacagagagatgatcgaggaacggctgaaaacctatgcccacctgttcgacgacaaagtgatgaagcagctgaagcggcggagatacaccggctggggcaggctgagccggaagctgatcaacggcatccgggacaagcagtccggcaagacaatcctggatttcctgaagtccgacggcttcgccaacagaaacttcatgcagctgatccacgacgacagcctgacctttaaagaggacatccagaaagcccaggtgtccggccagggcgatagcctgcacgagcacattgccaatctggccggcagccccgccattaagaagggcatcctgcagacagtgaaggtggtggacgagctcgtgaaagtgatgggccggcacaagcccgagaacatcgtgatcgaaatggccagagagaaccagaccacccagaagggacagaagaacagccgcgagagaatgaagcggatcgaagagggcatcaaagagctgggcagccagatcctgaaagaacaccccgtggaaaacacccagctgcagaacgagaagctgtacctgtactacctgcagaatgggcgggatatgtacgtggaccaggaactggacatcaaccggctgtccgactacgatgtggaccatatcgtgcctcagagctttctgaaggacgactccatcgacaacaaggtgctgaccagaagcgacaagaaccggggcaagagcgacaacgtgccctccgaagaggtcgtgaagaagatgaagaactactggcggcagctgctgaacgccaagctgattacccagagaaagttcgacaatctgaccaaggccgagagaggcggcctgagcgaactggataaggccggcttcatcaagagacagctggtggaaacccggcagatcacaaagcacgtggcacagatcctggactcccggatgaacactaagtacgacgagaatgacaagctgatccgggaagtgaaagtgatcaccctgaagtccaagctggtgtccgatttccggaaggatttccagttttacaaagtgcgcgagatcaacaactaccaccacgcccacgacgcctacctgaacgccgtcgtgggaaccgccctgatcaaaaagtaccctaagctggaaagcgagttcgtgtacggcgactacaaggtgtacgacgtgcggaagatgatcgccaagagcgagcaggaaatcggcaaggctaccgccaagtacttcttctacagcaacatcatgaactttttcaagaccgagattaccctggccaacggcgagatccggaagcggcctctgatcgagacaaacggcgaaaccggggagatcgtgtgggataagggccgggattttgccaccgtgcggaaagtgctgagcatgccccaagtgaatatcgtgaaaaagaccgaggtgcagacaggcggcttcagcaaagagtctatcctgcccaagaggaacagcgataagctgatcgccagaaagaaggactgggaccctaagaagtacggcggcttcgacagccccaccgtggcctattctgtgctggtggtggccaaagtggaaaagggcaagtccaagaaactgaagagtgtgaaagagctgctggggatcaccatcatggaaagaagcagcttcgagaagaatcccatcgactttctggaagccaagggctacaaagaagtgaaaaaggacctgatcatcaagctgcctaagtactccctgttcgagctggaaaacggccggaagagaatgctggcctctgccggcgaactgcagaagggaaacgaactggccctgccctccaaatatgtgaacttcctgtacctggccagccactatgagaagctgaagggctcccccgaggataatgagcagaaacagctgtttgtggaacagcacaagcactacctggacgagatcatcgagcagatcagcgagttctccaagagagtgatcctggccgacgctaatctggacaaagtgctgtccgcctacaacaagcaccgggataagcccatcagagagcaggccgagaatatcatccacctgtttaccctgaccaatctgggagcccctgccgccttcaagtactttgacaccaccatcgaccggaagaggtacaccagcaccaaagaggtgctggacgccaccctgatccaccagagcatcaccggcctgtacgagacacggatcgacctgtctcagctgggaggtgacagcggcgggagcggcgggagcggggggagcactaatctgagcgacatcattgagaaggagactgggaaacagctggtcattcaggagtccatcctgatgctgcctgaggaggtggaggaagtgatcggcaacaagccagagtctgacatcctggtgcacaccgcctacgacgagtccacagatgagaatgtgatgctgctgacctctgacgcccccgagtataagccttgggccctggtcatccaggattctaacggcgagaataagatcaagatgctgagcggaggatccggaggatctggaggcagcaccaacctgtctgacatcatcgagaaggagacaggcaagcagctggtcatccaggagagcatcctgatgctgcccgaagaagtcgaagaagtgatcggaaacaagcctgagagcgatatcctggtccataccgcctacgacgagagtaccgacgaaaatgtgatgctgctgacatccgacgccccagagtataagccctgggctctggtcatccaggattccaacggagagaacaaaatcaaaatgctgtctggcggctcaaaaagaaccgccgacggcagcgaattcgagcccaagaagaagaggaaagtctaaccggtcatcatcaccatcaccattgagtttaaacccgctgatcagcctcgactgtgccttctagttgccagccatctgttgtttgcccctcccccgtgccttccttgaccctggaaggtgccactcccactgtcctttcctaataaaatgaggaaattgcatcgcattgtctgagtaggtgtcattctattctggggggtggggtggggcaggacagcaagggggaggattgggaagacaatagcaggcatgctggggatgcggtgggctctatggcttctgaggcggaaagaaccagctggggctcgataccgtcgacctctagctagagcttggcgtaatcatggtcatagctgtttcctgtgtgaaattgttatccgctcacaattccacacaacatacgagccggaagcataaagtgtaaagcctagggtgcctaatgagtgagctaactcacattaattgcgttgcgctcactgcccgctttccagtcgggaaacctgtcgtgccagctgcattaatgaatcggccaacgcgcgggaagaggcggtttgcgtattgggcgcacttccgcttcctcgctcactgactcgctgcgctcggtcgttcggctgcggcgagcggtatcagctcactcaaaggcggtaatacggttatccacagaatcaggggataacgcaggaaagaacatgtgagcaaaaggccagcaaaaggccaggaaccgtaaaaaggccgcgttgctggcgtttttccataggctccgcccccctgacgagcatcacaaaaatcgacgctcaagtcagaggtggcgaaacccgacaggactataaagataccaggcgtttccccctggaagctccctcgtgcgctctcctgttccgaccctgccgcttaccggatacctgtccgcctttctcccttcgggaagcgtggcgctttctcatagctcacgctgtaggtatctcagttcggtgtaggtcgttcgctccaagctgggctgtgtgcacgaaccccccgttcagcccgaccgctgcgccttatccggtaactatcgtcttgagtccaacccggtaagacacgacttatcgccactggcagcagccactggtaacaggattagcagagcgaggtatgtaggcggtgctacagagttcttgaagtggtggcctaactacggctacactagaagaacagtatttggtatctgcgctctgctgaagccagttaccttcggaaaaagagttggtagctcttgatccggcaaacaaaccaccgctggtagcggtggtttttttgtttgcaagcagcagattacgcgcagaaaaaaaggatctcaagaaaatcctttgatcttttctacggggtctgacactcagtggaacgaaaactcacgttaagggattttggtcatgagattatcaaaaaggatcttcacctagatccttttaaattaaaaatgaagttttaaatcaatctaaagtatatatgagtaaacttggtctgacagttaccaatgcttaatcagtgaggcacctatctcagcgatctgtctatttcgttcatccatagttgcctgactccccgtcgtgtagataactacgatacgggagggcttaccatctggccccagtgctgcaatgataccgcgggacccacgctcaccggctccagatttatcagcaataaaccagccagccggaagggccgagcgcagaagtggtcctgcaactttatccgcctccatccagtctattaattgttgccgggaagctagagtaagtagttcgccagttaatagtttgcgcaacgttgttgccattgctacaggcatcgtggtgtcacgctcgtcgtttggtatggcttcattcagctccggttcccaacgatcaaggcgagttacatgatcccccatgttgtgcaaaaaagcggttagctccttcggtcctccgatcgttgtcagaagtaagttggccgcagtgttatcactcatggttatggcagcactgcataattctcttactgtcatgccatccgtaagatgcttttctgtgactggtgagtactcaaccaagtcattctgagaatagtgtatgcggcgaccgagttgctcttgcccggcgtcaatacgggataataccgcgccacatagcagaactttaaaagtgctcatcattggaaaacgttcttcggggcgaaaactctcaaggatcttaccgctgttgagatccagttcgatgtaacccactcgtgcacccaactgatcttcagcatcttttactttcaccagcgtttctgggtgagcaaaaacaggaaggcaaaatgccgcaaaaaagggaataagggcgacacggaaatgttgaatactcatactcttcctttttcaatattattgaagcatttatcagggttattgtctcatgagcggatacatatttgaatgtatttagaaaaataaacaaataggggttccgcgcacatttccccgaaaagtgccacctgacgtcgacggatcgggagatcgatctcccgatcccctagggtcgactctcagtacaatctgctctgatgccgcatagttaagccagtatctgctccctgcttgtgtgttggaggtcgctgagtagtgcgcgagcaaaatttaagctacaacaaggcaaggcttgaccgacaattgcatgaagaatctgcttagggttaggcgttttgcgctgcttcgcgatgtacgggccagatatacgcgttgacattgattattgac

SEQ ID NO: 551 - DNA, 7836 bp, synthetic construct
  source 1..7836: mol_type = other DNA
tagttattaatagtaatcaattacggggtcattagttcatagcccatatatggagttccgcgttacataacttacggtaaatggcccgcctggctgaccgcccaacgacccccgcccattgacgtcaataatgacgtatgttcccatagtaacgccaatagggactttccattgacgtcaatgggtggagtatttacggtaaactgcccacttggcagtacatcaagtgtatcatatgccaagtacgccccctattgacgtcaatgacggtaaatggcccgcctggcattatgcccagtacatgaccttatgggactttcctacttggcagtacatctacgtattagtcatcgctattaccatggtgatgcggttttggcagtacatcaatgggcgtggatagcggtttgactcacggggatttccaagtctccaccccattgacgtcaatgggagtttgttttggcaccaaaatcaacgggactttccaaaatgtcgtaacaactccgccccattgacgcaaatgggcggtaggcgtgtacggtgggaggtctatataagcagagctggtttagtgaaccgtcagatccgctagagatccgcggccgctaatacgactcactatagggagagccgccaccatgaaacggacagccgacggaagcgagttcgagtcaccaaagaagaagcggaaagtcagttctgaggtggagttttcccacgagtactggatgagacatgccctgaccctggccaagagggcacgggatgagggggcgggtcctgtgggagccgtgctggtgctgaacaatagagtgatcggcgagggctggaacagagccatcggcctgcacgacccaacagcccatgccgaaattatggccctgagacagggcggcctggtcatgcagaactacagactgtttgacgccaccctgtacgtgacattcgagccttgcgtgatgtgcgccggcgccatgatcaactctaggatcggccgcgtggtgtttggcgtgaggaactcaaaaagaggcgccgcaggctccctgatgaacgtgctgaactaccccggcatgaatcaccgcgtcgaaattaccgagggaatcctggcagatgaatgtgccgccctgctgtgcgatttctatcggatgcctagacaggtgttcaattctcagaagaaggcccagagctccatcaactctggcggatctagcggaggatcctctggcagcgagacaccaggaacaagcgagtcagcaacaccagagagcagtggcggcagcagcggcggcagcgggaagcgaaattacattctggggctggccattggcattacatcagtgggctatggcatcattgactacgagacaagggacgtgatcgacgccggcgtgagactgttcaaggaggccaacgtggagaacaatgagggccggagatccaagaggggagcaaggcgcctgaagcggagaaggcgccacagaatccagagagtgaagaagctgctgttcgattacaacctgctgaccgaccactccgagctgtctggcatcaatccttatgaggccagagtgaagggcctgtcccagaagctgtctgaggaggagtttagcgccgccctgctgcacctggcaaagaggagaggcgtgcacaacgtgaatgaggtggaggaggacaccggcaacgagctgtccacaaaggagcagatcagccgcaattccaaggccctggaggagaagtatgtggccgagctgcagctggagcggctgaagaaggatggcgaggtgaggggctccatcaatcgcttcaagacctctgactacgtgaaggaggccaagcagctgctgaaggtgcagaaggcctaccaccagctggatcagtcctttatcgatacatatatcgacctgctggagacaaggcgcacatactatgagggaccaggagagggctctcccttcggctggaaggacatcaaggagtggtacgagatgctgatgggccactgcacctattttccagaggagctgagaagcgtgaagtacgcctataacgccgatctgtacaacgccctgaatgacctgaacaacctggtcatcaccagggatgagaacgagaagctggagtactatgagaagttccagatcatcgagaacgtgttcaagcagaagaagaagcctacactgaagcagatcgccaaggagatcctggtgaacgaggaggacatcaagggctaccgcgtgacctccacaggcaagccagagttcaccaatctgaaggtgtatcacgatatcaaggacatcacagcccggaaggagatcatcgagaacgccgagctgctggatcagatcgccaagatcctgaccatctatcagagctccgaggacatccaggaggagctgaccaacctgaatagcgagctgacacaggaggagatcgagcagatcagcaatctgaagggctacaccggcacacacaacctgagcctgaaggccatcaatctgatcctggatgagctgtggcacacaaacgacaatcagatcgccatctttaaccggctgaagctggtgccaaagaaggtggacctgtcccagcagaaggagatcccaaccacactggtggacgatttcatcctgtctcccgtggtgaagcggagcttcatccagagcatcaaagtgatcaacgccatcatcaagaagtacggcctgcccaatgatatcatcatcgagctggccagggagaagaactccaaggacgcccagaagatgatcaatgagatgcagaagaggaaccgccagaccaatgagcggatcgaggagatcatcagaaccacaggcaaggagaacgccaagtacctgatcgagaagatcaagctgcacgatatgcaggagggcaagtgtctgtattctctggaggccatccctctggaggacctgctgaacaatccattcaactacgaggtggatcacatcatcccccggagcgtgagcttcgacaattcttttaacaataaggtgctggtgaagcaggaggagaacagcaagaagggcaataggacccctttccagtacctgtctagctccgattctaagatcagctacgagacattcaagaagcacatcctgaatctggccaagggcaagggccgcatcagcaagaccaagaaggagtacctgctggaggagcgggacatcaacagattctccgtgcagaaggacttcatcaaccggaatctggtggacaccagatacgccacacgcggcctgatgaatctgctgcggtcttatttcagagtgaacaatctggatgtgaaggtaaagagcatcaacggcggcttcacctcctttctgcggagaaagtggaagtttaagaaggagcgcaacaagggctataagcaccacgccgaggatgccctgatcatcgccaatgccgacttcatctttaaggagtggaagaagctggacaaggccaagaaagtgatggagaaccagatgttcgaggagaagcaggccgagagcatgcccgagatcgagacagagcaggagtacaaggagattttcatcacacctcaccagatcaagcacatcaaggacttcaaggactacaagtattctcacagggtggataagaagcccaaccgcgagctgatcaatgacaccctgtatagcacacggaaggacgataagggcaataccctgatcgtgaacaatctgaacggcctgtacgacaaggataatgacaagctgaagaagctgatcaacaagtctcccgagaagctgctgatgtaccaccacgatcctcagacatatcagaagctgaagctgatcatggagcagtacggcgacgagaagaacccactgtataagtactatgaggagacaggcaactacctgacaaagtatagcaagaaggataatggccccgtgatcaagaagatcaagtactatggcaacaagctgaatgcccacctggacatcaccgacgattaccctaactctcgcaataaggtggtgaagctgagcctgaagccataccggttcgacgtgtacctggacaacggcgtgtataagtttgtgacagtgaagaatctggatgtgatcaagaaggagaactactatgaggtgaacagcaagtgctacgaggaggccaagaagctgaagaagatcagcaaccaggccgagttcatcgcctctttttacaacaatgacctgatcaagatcaatggcgagctgtatagagtgatcggcgtgaacaatgatctgctgaacagaatcgaagtgaatatgatcgacatcacctacagggagtatctggagaacatgaatgataagaggccccctcgcatcatcaagaccatcgcctctaagacacagagcatcaagaagtacagcacagacatcctggggaacctgtatgaagtcaagagcaagaaacatcctcagattatcaagaaaggcagcggcgggagcggcgggagcggggggagcactaatctgagcgacatcattgagaaggagactgggaaacagctggtcattcaggagtccatcctgatgctgcctgaggaggtggaggaagtgatcggcaacaagccagagtctgacatcctggtgcacaccgcctacgacgagtccacagatgagaatgtgatgctgctgacctctgacgcccccgagtataagccttgggccctggtcatccaggattctaacggcgagaataagatcaagatgctgagcggaggatccggaggatctggaggcagcaccaacctgtctgacatcatcgagaaggagacaggcaagcagctggtcatccaggagagcatcctgatgctgcccgaagaagtcgaagaagtgatcggaaacaagcctgagagcgatatcctggtccataccgcctacgacgagagtaccgacgaaaatgtgatgctgctgacatccgacgccccagagtataagccctgggctctggtcatccaggattccaacggagagaacaaaatcaaaatgctgtctggcggctcaaaaagaaccgccgacggcagcgaattcgagcccaagaagaagaggaaagtctaaccggtcatcatcaccatcaccattgagtttaaacccgctgatcagcctcgactgtgccttctagttgccagccatctgttgtttgcccctcccccgtgccttccttgaccctggaaggtgccactcccactgtcctttcctaataaaatgaggaaattgcatcgcattgtctgagtaggtgtcattctattctggggggtggggtggggcaggacagcaagggggaggattgggaagacaatagcaggcatgctggggatgcggtgggctctatggcttctgaggcggaaagaaccagctggggctcgataccgtcgacctctagctagagcttggcgtaatcatggtcatagctgtttcctgtgtgaaattgttatccgctcacaattccacacaacatacgagccggaagcataaagtgtaaagcctagggtgcctaatgagtgagctaactcacattaattgcgttgcgctcactgcccgctttccagtcgggaaacctgtcgtgccagctgcattaatgaatcggccaacgcgcgggaagaggcggtttgcgtattgggcgcacttccgcttcctcgctcactgactcgctgcgctcggtcgttcggctgcggcgagcggtatcagctcactcaaaggcggtaatacggttatccacagaatcaggggataacgcaggaaagaacatgtgagcaaaaggccagcaaaaggccaggaaccgtaaaaaggccgcgttgctggcgtttttccataggctccgcccccctgacgagcatcacaaaaatcgacgctcaagtcagaggtggcgaaacccgacaggactataaagataccaggcgtttccccctggaagctccctcgtgcgctctcctgttccgaccctgccgcttaccggatacctgtccgcctttctcccttcgggaagcgtggcgctttctcatagctcacgctgtaggtatctcagttcggtgtaggtcgttcgctccaagctgggctgtgtgcacgaaccccccgttcagcccgaccgctgcgccttatccggtaactatcgtcttgagtccaacccggtaagacacgacttatcgccactggcagcagccactggtaacaggattagcagagcgaggtatgtaggcggtgctacagagttcttgaagtggtggcctaactacggctacactagaagaacagtatttggtatctgcgctctgctgaagccagttaccttcggaaaaagagttggtagctcttgatccggcaaacaaaccaccgctggtagcggtggtttttttgtttgcaagcagcagattacgcgcagaaaaaaaggatctcaagaaaatcctttgatcttttctacggggtctgacactcagtggaacgaaaactcacgttaagggattttggtcatgagattatcaaaaaggatcttcacctagatccttttaaattaaaaatgaagttttaaatcaatctaaagtatatatgagtaaacttggtctgacagttaccaatgcttaatcagtgaggcacctatctcagcgatctgtctatttcgttcatccatagttgcctgactccccgtcgtgtagataactacgatacgggagggcttaccatctggccccagtgctgcaatgataccgcgggacccacgctcaccggctccagatttatcagcaataaaccagccagccggaagggccgagcgcagaagtggtcctgcaactttatccgcctccatccagtctattaattgttgccgggaagctagagtaagtagttcgccagttaatagtttgcgcaacgttgttgccattgctacaggcatcgtggtgtcacgctcgtcgtttggtatggcttcattcagctccggttcccaacgatcaaggcgagttacatgatcccccatgttgtgcaaaaaagcggttagctccttcggtcctccgatcgttgtcagaagtaagttggccgcagtgttatcactcatggttatggcagcactgcataattctcttactgtcatgccatccgtaagatgcttttctgtgactggtgagtactcaaccaagtcattctgagaatagtgtatgcggcgaccgagttgctcttgcccggcgtcaatacgggataataccgcgccacatagcagaactttaaaagtgctcatcattggaaaacgttcttcggggcgaaaactctcaaggatcttaccgctgttgagatccagttcgatgtaacccactcgtgcacccaactgatcttcagcatcttttactttcaccagcgtttctgggtgagcaaaaacaggaaggcaaaatgccgcaaaaaagggaataagggcgacacggaaatgttgaatactcatactcttcctttttcaatattattgaagcatttatcagggttattgtctcatgagcggatacatatttgaatgtatttagaaaaataaacaaataggggttccgcgcacatttccccgaaaagtgccacctgacgtcgacggatcgggagatcgatctcccgatcccctagggtcgactctcagtacaatctgctctgatgccgcatagttaagccagtatctgctccctgcttgtgtgttggaggtcgctgagtagtgcgcgagcaaaatttaagctacaacaaggcaaggcttgaccgacaattgcatgaagaatctgcttagggttaggcgttttgcgctgcttcgcgatgtacgggccagatatacgcgttgacattgattattgac

SEQ ID NO: 552 - DNA, 8778 bp, synthetic construct
  source 1..8778: mol_type = other DNA
tagttattaatagtaatcaattacggggtcattagttcatagcccatatatggagttccgcgttacataacttacggtaaatggcccgcctggctgaccgcccaacgacccccgcccattgacgtcaataatgacgtatgttcccatagtaacgccaatagggactttccattgacgtcaatgggtggagtatttacggtaaactgcccacttggcagtacatcaagtgtatcatatgccaagtacgccccctattgacgtcaatgacggtaaatggcccgcctggcattatgcccagtacatgaccttatgggactttcctacttggcagtacatctacgtattagtcatcgctattaccatggtgatgcggttttggcagtacatcaatgggcgtggatagcggtttgactcacggggatttccaagtctccaccccattgacgtcaatgggagtttgttttggcaccaaaatcaacgggactttccaaaatgtcgtaacaactccgccccattgacgcaaatgggcggtaggcgtgtacggtgggaggtctatataagcagagctggtttagtgaaccgtcagatccgctagagatccgcggccgctaatacgactcactatagggagagccgccaccatgaaacggacagccgacggaagcgagttcgagtcaccaaagaagaagcggaaagtcagttctgaggtggagttttcccacgagtactggatgagacatgccctgaccctggccaagagggcacgggatgagggggcgggtcctgtgggagccgtgctggtgctgaacaatagagtgatcggcgagggctggaacagagccatcggcctgcacgacccaacagcccatgccgaaattatggccctgagacagggcggcctggtcatgcagaactacagactgtttgacgccaccctgtacgtgacattcgagccttgcgtgatgtgcgccggcgccatgatcaactctaggatcggccgcgtggtgtttggcgtgaggaactcaaaaagaggcgccgcaggctccctgatgaacgtgctgaactaccccggcatgaatcaccgcgtcgaaattaccgagggaatcctggcagatgaatgtgccgccctgctgtgcgatttctatcggatgcctagacaggtgttcaattctcagaagaaggcccagagctccatcaactctggcggatctagcggaggatcctctggcagcgagacaccaggaacaagcgagtcagcaacaccagagagcagtggcggcagcagcggcggcagcgacaagaagtacagcatcggcctggccatcggcaccaactctgtgggctgggccgtgatcaccgacgagtacaaggtgcccagcaagaaattcaaggtgctgggcaacaccgaccggcacagcatcaagaagaacctgatcggagccctgctgttcgacagcggcgaaacagccgaggccacccggctgaagagaaccgccagaagaagatacaccagacggaagaaccggatctgctatctgcaagagatcttcagcaacgagatggccaaggtggacgacagcttcttccacagactggaagagtccttcctggtggaagaggataagaagcacgagcggcaccccatcttcggcaacatcgtggacgaggtggcctaccacgagaagtaccccaccatctaccacctgagaaagaaactggtggacagcaccgacaaggccgacctgcggctgatctatctggccctggcccacatgatcaagttccggggccacttcctgatcgagggcgacctgaaccccgacaacagcgacgtggacaagctgttcatccagctggtgcagacctacaaccagctgttcgaggaaaaccccatcaacgccagcggcgtggacgccaaggccatcctgtctgccagactgagcaagagcagacggctggaaaatctgatcgcccagctgcccggcgagaagaagaatggcctgttcggaaacctgattgccctgagcctgggcctgacccccaacttcaagagcaacttcgacctggccgaggatgccaaactgcagctgagcaaggacacctacgacgacgacctggacaacctgctggcccagatcggcgaccagtacgccgacctgtttctggccgccaagaacctgtccgacgccatcctgctgagcgacatcctgagagtgaacaccgagatcaccaaggcccccctgagcgcctctatgatcaagagatacgacgagcaccaccaggacctgaccctgctgaaagctctcgtgcggcagcagctgcctgagaagtacaaagagattttcttcgaccagagcaagaacggctacgccggctacattgacggcggagccagccaggaagagttctacaagttcatcaagcccatcctggaaaagatggacggcaccgaggaactgctcgtgaagctgaacagagaggacctgctgcggaagcagcggaccttcgacaacggcagcatcccccaccagatccacctgggagagctgcacgccattctgcggcggcaggaagatttttacccattcctgaaggacaaccgggaaaagatcgagaagatcctgaccttccgcatcccctactacgtgggccctctggccaggggaaacagcagattcgcctggatgaccagaaagagcgaggaaaccatcaccccctggaacttcgaggaagtggtggacaagggcgcttccgcccagagcttcatcgagcggatgaccaacttcgataagaacctgcccaacgagaaggtgctgcccaagcacagcctgctgtacgagtacttcaccgtgtataacgagctgaccaaagtgaaatacgtgaccgagggaatgagaaagcccgccttcctgagcggcgagcagaaaaaggccatcgtggacctgctgttcaagaccaaccggaaagtgaccgtgaagcagctgaaagaggactacttcaagaaaatcgagtgcttcgactccgtggaaatctccggcgtggaagatcggttcaacgcctccctgggcacataccacgatctgctgaaaattatcaaggacaaggacttcctggacaatgaggaaaacgaggacattctggaagatatcgtgctgaccctgacactgtttgaggacagagagatgatcgaggaacggctgaaaacctatgcccacctgttcgacgacaaagtgatgaagcagctgaagcggcggagatacaccggctggggcaggctgagccggaagctgatcaacggcatccgggacaagcagtccggcaagacaatcctggatttcctgaagtccgacggcttcgccaacagaaacttcatgcagctgatccacgacgacagcctgacctttaaagaggacatccagaaagcccaggtgtccggccagggcgatagcctgcacgagcacattgccaatctggccggcagccccgccattaagaagggcatcctgcagacagtgaaggtggtggacgagctcgtgaaagtgatgggccggcacaagcccgagaacatcgtgatcgaaatggccagagagaaccagaccacccagaagggacagaagaacagccgcgagagaatgaagcggatcgaagagggcatcaaagagctgggcagccagatcctgaaagaacaccccgtggaaaacacccagctgcagaacgagaagctgtacctgtactacctgcagaatgggcgggatatgtacgtggaccaggaactggacatcaaccggctgtccgactacgatgtggaccatatcgtgcctcagagctttctgaaggacgactccatcgacaacaaggtgctgaccagaagcgacaagaaccggggcaagagcgacaacgtgccctccgaagaggtcgtgaagaagatgaagaactactggcggcagctgctgaacgccaagctgattacccagagaaagttcgacaatctgaccaaggccgagagaggcggcctgagcgaactggataaggccggcttcatcaagagacagctggtggaaacccggcagatcacaaagcacgtggcacagatcctggactcccggatgaacactaagtacgacgagaatgacaagctgatccgggaagtgaaagtgatcaccctgaagtccaagctggtgtccgatttccggaaggatttccagttttacaaagtgcgcgagatcaacaactaccaccacgcccacgacgcctacctgaacgccgtcgtgggaaccgccctgatcaaaaagtaccctaagctggaaagcgagttcgtgtacggcgactacaaggtgtacgacgtgcggaagatgatcgccaagagcgagcaggaaatcggcaaggctaccgccaagtacttcttctacagcaacatcatgaactttttcaagaccgagattaccctggccaacggcgagatccggaagcggcctctgatcgagacaaacggcgaaaccggggagatcgtgtgggataagggccgggattttgccaccgtgcggaaagtgctgagcatgccccaagtgaatatcgtgaaaaagaccgaggtgcagacaggcggcttcagcaaagagtctatccggcccaagaggaacagcgataagctgatcgccagaaagaaggactgggaccctaagaagtacggcggcttcgtgagccccaccgtggcctattctgtgctggtggtggccaaagtggaaaagggcaagtccaagaaactgaagagtgtgaaagagctgctggggatcaccatcatggaaagaagcagcttcgagaagaatcccatcgactttctggaagccaagggctacaaagaagtgaaaaaggacctgatcatcaagctgcctaagtactccctgttcgagctggaaaacggccggaagagaatgctggcctctgcccggttcctgcagaagggaaacgaactggccctgccctccaaatatgtgaacttcctgtacctggccagccactatgagaagctgaagggctcccccgaggataatgagcagaaacagctgtttgtggaacagcacaagcactacctggacgagatcatcgagcagatcagcgagttctccaagagagtgatcctggccgacgctaatctggacaaagtgctgtccgcctacaacaagcaccgggataagcccatcagagagcaggccgagaatatcatccacctgtttaccctgaccaatctgggagcccctcgggccttcaagtactttgacaccaccatcgaccggaaggtgtaccggagcaccaaagaggtgctggacgccaccctgatccaccagagcatcaccggcctgtacgagacacggatcgacctgtctcagctgggaggtgacagcggcgggagcggcgggagcggggggagcactaatctgagcgacatcattgagaaggagactgggaaacagctggtcattcaggagtccatcctgatgctgcctgaggaggtggaggaagtgatcggcaacaagccagagtctgacatcctggtgcacaccgcctacgacgagtccacagatgagaatgtgatgctgctgacctctgacgcccccgagtataagccttgggccctggtcatccaggattctaacggcgagaataagatcaagatgctgagcggaggatccggaggatctggaggcagcaccaacctgtctgacatcatcgagaaggagacaggcaagcagctggtcatccaggagagcatcctgatgctgcccgaagaagtcgaagaagtgatcggaaacaagcctgagagcgatatcctggtccataccgcctacgacgagagtaccgacgaaaatgtgatgctgctgacatccgacgccccagagtataagccctgggctctggtcatccaggattccaacggagagaacaaaatcaaaatgctgtctggcggctcaaaaagaaccgccgacggcagcgaattcgagcccaagaagaagaggaaagtctaaccggtcatcatcaccatcaccattgagtttaaacccgctgatcagcctcgactgtgccttctagttgccagccatctgttgtttgcccctcccccgtgccttccttgaccctggaaggtgccactcccactgtcctttcctaataaaatgaggaaattgcatcgcattgtctgagtaggtgtcattctattctggggggtggggtggggcaggacagcaagggggaggattgggaagacaatagcaggcatgctggggatgcggtgggctctatggcttctgaggcggaaagaaccagctggggctcgataccgtcgacctctagctagagcttggcgtaatcatggtcatagctgtttcctgtgtgaaattgttatccgctcacaattccacacaacatacgagccggaagcataaagtgtaaagcctagggtgcctaatgagtgagctaactcacattaattgcgttgcgctcactgcccgctttccagtcgggaaacctgtcgtgccagctgcattaatgaatcggccaacgcgcggggagaggcggtttgcgtattgggcgcacttccgcttcctcgctcactgactcgctgcgctcggtcgttcggctgcggcgagcggtatcagctcactcaaaggcggtaatacggttatccacagaatcaggggataacgcaggaaagaacatgtgagcaaaaggccagcaaaaggccaggaaccgtaaaaaggccgcgttgctggcgtttttccataggctccgcccccctgacgagcatcacaaaaatcgacgctcaagtcagaggtggcgaaacccgacaggactataaagataccaggcgtttccccctggaagctccctcgtgcgctctcctgttccgaccctgccgcttaccggatacctgtccgcctttctcccttcgggaagcgtggcgctttctcatagctcacgctgtaggtatctcagttcggtgtaggtcgttcgctccaagctgggctgtgtgcacgaaccccccgttcagcccgaccgctgcgccttatccggtaactatcgtcttgagtccaacccggtaagacacgacttatcgccactggcagcagccactggtaacaggattagcagagcgaggtatgtaggcggtgctacagagttcttgaagtggtggcctaactacggctacactagaagaacagtatttggtatctgcgctctgctgaagccagttaccttcggaaaaagagttggtagctcttgatccggcaaacaaaccaccgctggtagcggtggtttttttgtttgcaagcagcagattacgcgcagaaaaaaaggatctcaagaagatcctttgatcttttctacggggtctgacactcagtggaacgaaaactcacgttaagggattttggtcatgagattatcaaaaaggatcttcacctagatccttttaaattaaaaatgaagttttaaatcaatctaaagtatatatgagtaaacttggtctgacagttaccaatgcttaatcagtgaggcacctatctcagcgatctgtctatttcgttcatccatagttgcctgactccccgtcgtgtagataactacgatacgggagggcttaccatctggccccagtgctgcaatgataccgcgggacccacgctcaccggctccagatttatcagcaataaaccagccagccggaagggccgagcgcagaagtggtcctgcaactttatccgcctccatccagtctattaattgttgccgggaagctagagtaagtagttcgccagttaatagtttgcgcaacgttgttgccattgctacaggcatcgtggtgtcacgctcgtcgtttggtatggcttcattcagctccggttcccaacgatcaaggcgagttacatgatcccccatgttgtgcaaaaaagcggttagctccttcggtcctccgatcgttgtcagaagtaagttggccgcagtgttatcactcatggttatggcagcactgcataattctcttactgtcatgccatccgtaagatgcttttctgtgactggtgagtactcaaccaagtcattctgagaatagtgtatgcggcgaccgagttgctcttgcccggcgtcaatacgggataataccgcgccacatagcagaactttaaaagtgctcatcattggaaaacgttcttcggggcgaaaactctcaaggatcttaccgctgttgagatccagttcgatgtaacccactcgtgcacccaactgatcttcagcatcttttactttcaccagcgtttctgggtgagcaaaaacaggaaggcaaaatgccgcaaaaaagggaataagggcgacacggaaatgttgaatactcatactcttcctttttcaatattattgaagcatttatcagggttattgtctcatgagcggatacatatttgaatgtatttagaaaaataaacaaataggggttccgcgcacatttccccgaaaagtgccacctgacgtcgacggatcgggagatcgatctcccgatcccctagggtcgactctcagtacaatctgctctgatgccgcatagttaagccagtatctgctccctgcttgtgtgttggaggtcgctgagtagtgcgcgagcaaaatttaagctacaacaaggcaaggcttgaccgacaattgcatgaagaatctgcttagggttaggcgttttgcgctgcttcgcgatgtacgggccagatatacgcgttgacattgattattgac

SEQ ID NO: 553 - protein, 1853 aa, synthetic construct
MKRTADGSEFESPKKKRKVSSETGPVAVDPTLRRRIEPHEFEVFFDPRELRKETCLLYEINWGGRHSIWRHTSQNTNKHVEVNFIEKFTTERYFCPNTRCSITWFLSWSPCGECSRAITEFLSRYPHVTLFIYIARLYHHADPRNRQGLRDLISSGVTIQIMTEQESGYCWRNFVNYSPSNEAHWPRYPHLWVRLYVLELYCIILGLPPCLNILRRKQPQLTFFTIALQSCHYQRLPPHILWATGLKSGGSSGGSSGSETPGTSESATPESSGGSSGGSDKKYSIGLAIGTNSVGWAVITDEYKVPSKKFKVLGNTDRHSIKKNLIGALLFDSGETAEATRLKRTARRRYTRRKNRICYLQEIFSNEMAKVDDSFFHRLEESFLVEEDKKHERHPIFGNIVDEVAYHEKYPTIYHLRKKLVDSTDKADLRLIYLALAHMIKFRGHFLIEGDLNPDNSDVDKLFIQLVQTYNQLFEENPINASGVDAKAILSARLSKSRRLENLIAQLPGEKKNGLFGNLIALSLGLTPNFKSNFDLAEDAKLQLSKDTYDDDLDNLLAQIGDQYADLFLAAKNLSDAILLSDILRVNTEITKAPLSASMIKRYDEHHQDLTLLKALVRQQLPEKYKEIFFDQSKNGYAGYIDGGASQEEFYKFIKPILEKMDGTEELLVKLNREDLLRKQRTFDNGSIPHQIHLGELHAILRRQEDFYPFLKDNREKIEKILTFRIPYYVGPLARGNSRFAWMTRKSEETITPWNFEEVVDKGASAQSFIERMTNFDKNLPNEKVLPKHSLLYEYFTVYNELTKVKYVTEGMRKPAFLSGEQKKAIVDLLFKTNRKVTVKQLKEDYFKKIECFDSVEISGVEDRFNASLGTYHDLLKIIKDKDFLDNEENEDILEDIVLTLTLFEDREMIEERLKTYAHLFDDKVMKQLKRRRYTGWGRLSRKLINGIRDKQSGKTILDFLKSDGFANRNFMQLIHDDSLTFKEDIQKAQVSGQGDSLHEHIANLAGSPAIKKGILQTVKVVDELVKVMGRHKPENIVIEMARENQTTQKGQKNSRERMKRIEEGIKELGSQILKEHPVENTQLQNEKLYLYYLQNGRDMYVDQELDINRLSDYDVDHIVPQSFLKDDSIDNKVLTRSDKNRGKSDNVPSEEVVKKMKNYWRQLLNAKLITQRKFDNLTKAERGGLSELDKAGFIKRQLVETRQITKHVAQILDSRMNTKYDENDKLIREVKVITLKSKLVSDFRKDFQFYKVREINNYHHAHDAYLNAVVGTALIKKYPKLESEFVYGDYKVYDVRKMIAKSEQEIGKATAKYFFYSNIMNFFKTEITLANGEIRKRPLIETNGETGEIVWDKGRDFATVRKVLSMPQVNIVKKTEVQTGGFSKESILPKRNSDKLIARKKDWDPKKYGGFDSPTVAYSVLVVAKVEKGKSKKLKSVKELLGITIMERSSFEKNPIDFLEAKGYKEVKKDLIIKLPKYSLFELENGRKRMLASAGELQKGNELALPSKYVNFLYLASHYEKLKGSPEDNEQKQLFVEQHKHYLDEIIEQISEFSKRVILADANLDKVLSAYNKHRDKPIREQAENIIHLFTLTNLGAPAAFKYFDTTIDRKRYTSTKEVLDATLIHQSITGLYETRIDLSQLGGDSGGSGGSGGSTNLSDIIEKETGKQLVIQESILMLPEEVEEVIGNKPESDILVHTAYDESTDENVMLLTSDAPEYKPWALVIQDSNGENKIKMLSGGSGGSGGSTNLSDIIEKETGKQLVIQESILMLPEEVEEVIGNKPESDILVHTAYDESTDENVMLLTSDAPEYKPWALVIQDSNGENKIKMLSGGSKRTADGSEFEPKKKRKV

SEQ ID NO: 554 - protein, 1853 aa, synthetic construct
MKRTADGSEFESPKKKRKVSSETGPVAVDPTLRRRIEPHEFEVFFDPRELRKETCLLYEINWGGRHSIWRHTSQNTNKHVEVNFIEKFTTERYFCPNTRCSITWFLSYSPCGECSRAITEFLSRYPHVTLFIYIARLYHHADPENRQGLRDLISSGVTIQIMTEQESGYCWRNFVNYSPSNEAHWPRYPHLWVRLYVLELYCIILGLPPCLNILRRKQPQLTFFTIALQSCHYQRLPPHILWATGLKSGGSSGGSSGSETPGTSESATPESSGGSSGGSDKKYSIGLAIGTNSVGWAVITDEYKVPSKKFKVLGNTDRHSIKKNLIGALLFDSGETAEATRLKRTARRRYTRRKNRICYLQEIFSNEMAKVDDSFFHRLEESFLVEEDKKHERHPIFGNIVDEVAYHEKYPTIYHLRKKLVDSTDKADLRLIYLALAHMIKFRGHFLIEGDLNPDNSDVDKLFIQLVQTYNQLFEENPINASGVDAKAILSARLSKSRRLENLIAQLPGEKKNGLFGNLIALSLGLTPNFKSNFDLAEDAKLQLSKDTYDDDLDNLLAQIGDQYADLFLAAKNLSDAILLSDILRVNTEITKAPLSASMIKRYDEHHQDLTLLKALVRQQLPEKYKEIFFDQSKNGYAGYIDGGASQEEFYKFIKPILEKMDGTEELLVKLNREDLLRKQRTFDNGSIPHQIHLGELHAILRRQEDFYPFLKDNREKIEKILTFRIPYYVGPLARGNSRFAWMTRKSEETITPWNFEEVVDKGASAQSFIERMTNFDKNLPNEKVLPKHSLLYEYFTVYNELTKVKYVTEGMRKPAFLSGEQKKAIVDLLFKTNRKVTVKQLKEDYFKKIECFDSVEISGVEDRFNASLGTYHDLLKIIKDKDFLDNEENEDILEDIVLTLTLFEDREMIEERLKTYAHLFDDKVMKQLKRRRYTGWGRLSRKLINGIRDKQSGKTILDFLKSDGFANRNFMQLIHDDSLTFKEDIQKAQVSGQGDSLHEHIANLAGSPAIKKGILQTVKVVDELVKVMGRHKPENIVIEMARENQTTQKGQKNSRERMKRIEEGIKELGSQILKEHPVENTQLQNEKLYLYYLQNGRDMYVDQELDINRLSDYDVDHIVPQSFLKDDSIDNKVLTRSDKNRGKSDNVPSEEVVKKMKNYWRQLLNAKLITQRKFDNLTKAERGGLSELDKAGFIKRQLVETRQITKHVAQILDSRMNTKYDENDKLIREVKVITLKSKLVSDFRKDFQFYKVREINNYHHAHDAYLNAVVGTALIKKYPKLESEFVYGDYKVYDVRKMIAKSEQEIGKATAKYFFYSNIMNFFKTEITLANGEIRKRPLIETNGETGEIVWDKGRDFATVRKVLSMPQVNIVKKTEVQTGGFSKESILPKRNSDKLIARKKDWDPKKYGGFDSPTVAYSVLVVAKVEKGKSKKLKSVKELLGITIMERSSFEKNPIDFLEAKGYKEVKKDLIIKLPKYSLFELENGRKRMLASAGELQKGNELALPSKYVNFLYLASHYEKLKGSPEDNEQKQLFVEQHKHYLDEIIEQISEFSKRVILADANLDKVLSAYNKHRDKPIREQAENIIHLFTLTNLGAPAAFKYFDTTIDRKRYTSTKEVLDATLIHQSITGLYETRIDLSQLGGDSGGSGGSGGSTNLSDIIEKETGKQLVIQESILMLPEEVEEVIGNKPESDILVHTAYDESTDENVMLLTSDAPEYKPWALVIQDSNGENKIKMLSGGSGGSGGSTNLSDIIEKETGKQLVIQESILMLPEEVEEVIGNKPESDILVHTAYDESTDENVMLLTSDAPEYKPWALVIQDSNGENKIKMLSGGSKRTADGSEFEPKKKRKV

SEQ ID NO: 555 - protein, 1853 aa, synthetic construct
MKRTADGSEFESPKKKRKVSSETGPVAVDPTLRRRIEPHEFEVFFDPRELRKETCLLYEINWGGRHSIWRHTSQNTNKHVEVNFIEKFTTERYFCPNTRCSITWFLSYSPCGECSRAITEFLSRYPHVTLFIYIARLYHHADPRNRQGLEDLISSGVTIQIMTEQESGYCWRNFVNYSPSNEAHWPRYPHLWVRLYVLELYCIILGLPPCLNILRRKQPQLTFFTIALQSCHYQRLPPHILWATGLKSGGSSGGSSGSETPGTSESATPESSGGSSGGSDKKYSIGLAIGTNSVGWAVITDEYKVPSKKFKVLGNTDRHSIKKNLIGALLFDSGETAEATRLKRTARRRYTRRKNRICYLQEIFSNEMAKVDDSFFHRLEESFLVEEDKKHERHPIFGNIVDEVAYHEKYPTIYHLRKKLVDSTDKADLRLIYLALAHMIKFRGHFLIEGDLNPDNSDVDKLFIQLVQTYNQLFEENPINASGVDAKAILSARLSKSRRLENLIAQLPGEKKNGLFGNLIALSLGLTPNFKSNFDLAEDAKLQLSKDTYDDDLDNLLAQIGDQYADLFLAAKNLSDAILLSDILRVNTEITKAPLSASMIKRYDEHHQDLTLLKALVRQQLPEKYKEIFFDQSKNGYAGYIDGGASQEEFYKFIKPILEKMDGTEELLVKLNREDLLRKQRTFDNGSIPHQIHLGELHAILRRQEDFYPFLKDNREKIEKILTFRIPYYVGPLARGNSRFAWMTRKSEETITPWNFEEVVDKGASAQSFIERMTNFDKNLPNEKVLPKHSLLYEYFTVYNELTKVKYVTEGMRKPAFLSGEQKKAIVDLLFKTNRKVTVKQLKEDYFKKIECFDSVEISGVEDRFNASLGTYHDLLKIIKDKDFLDNEENEDILEDIVLTLTLFEDREMIEERLKTYAHLFDDKVMKQLKRRRYTGWGRLSRKLINGIRDKQSGKTILDFLKSDGFANRNFMQLIHDDSLTFKEDIQKAQVSGQGDSLHEHIANLAGSPAIKKGILQTVKVVDELVKVMGRHKPENIVIEMARENQTTQKGQKNSRERMKRIEEGIKELGSQILKEHPVENTQLQNEKLYLYYLQNGRDMYVDQELDINRLSDYDVDHIVPQSFLKDDSIDNKVLTRSDKNRGKSDNVPSEEVVKKMKNYWRQLLNAKLITQRKFDNLTKAERGGLSELDKAGFIKRQLVETRQITKHVAQILDSRMNTKYDENDKLIREVKVITLKSKLVSDFRKDFQFYKVREINNYHHAHDAYLNAVVGTALIKKYPKLESEFVYGDYKVYDVRKMIAKSEQEIGKATAKYFFYSNIMNFFKTEITLANGEIRKRPLIETNGETGEIVWDKGRDFATVRKVLSMPQVNIVKKTEVQTGGFSKESILPKRNSDKLIARKKDWDPKKYGGFDSPTVAYSVLVVAKVEKGKSKKLKSVKELLGITIMERSSFEKNPIDFLEAKGYKEVKKDLIIKLPKYSLFELENGRKRMLASAGELQKGNELALPSKYVNFLYLASHYEKLKGSPEDNEQKQLFVEQHKHYLDEIIEQISEFSKRVILADANLDKVLSAYNKHRDKPIREQAENIIHLFTLTNLGAPAAFKYFDTTIDRKRYTSTKEVLDATLIHQSITGLYETRIDLSQLGGDSGGSGGSGGSTNLSDIIEKETGKQLVIQESILMLPEEVEEVIGNKPESDILVHTAYDESTDENVMLLTSDAPEYKPWALVIQDSNGENKIKMLSGGSGGSGGSTNLSDIIEKETGKQLVIQESILMLPEEVEEVIGNKPESDILVHTAYDESTDENVMLLTSDAPEYKPWALVIQDSNGENKIKMLSGGSKRTADGSEFEPKKKRKV

SEQ ID NO: 556 - protein, 1853 aa, synthetic construct
MKRTADGSEFESPKKKRKVSSETGPVAVDPTLRRRIEPHEFEVFFDPRELRKETCLLYEINWGGRHSIWRHTSQNTNKHVEVNFIEKFTTERYFCPNTRCSITWFLSYSPCGECSRAITEFLSRYPHVTLFIYIARLYHHADPENRQGLEDLISSGVTIQIMTEQESGYCWRNFVNYSPSNEAHWPRYPHLWVRLYVLELYCIILGLPPCLNILRRKQPQLTFFTIALQSCHYQRLPPHILWATGLKSGGSSGGSSGSETPGTSESATPESSGGSSGGSDKKYSIGLAIGTNSVGWAVITDEYKVPSKKFKVLGNTDRHSIKKNLIGALLFDSGETAEATRLKRTARRRYTRRKNRICYLQEIFSNEMAKVDDSFFHRLEESFLVEEDKKHERHPIFGNIVDEVAYHEKYPTIYHLRKKLVDSTDKADLRLIYLALAHMIKFRGHFLIEGDLNPDNSDVDKLFIQLVQTYNQLFEENPINASGVDAKAILSARLSKSRRLENLIAQLPGEKKNGLFGNLIALSLGLTPNFKSNFDLAEDAKLQLSKDTYDDDLDNLLAQIGDQYADLFLAAKNLSDAILLSDILRVNTEITKAPLSASMIKRYDEHHQDLTLLKALVRQQLPEKYKEIFFDQSKNGYAGYIDGGASQEEFYKFIKPILEKMDGTEELLVKLNREDLLRKQRTFDNGSIPHQIHLGELHAILRRQEDFYPFLKDNREKIEKILTFRIPYYVGPLARGNSRFAWMTRKSEETITPWNFEEVVDKGASAQSFIERMTNFDKNLPNEKVLPKHSLLYEYFTVYNELTKVKYVTEGMRKPAFLSGEQKKAIVDLLFKTNRKVTVKQLKEDYFKKIECFDSVEISGVEDRFNASLGTYHDLLKIIKDKDFLDNEENEDILEDIVLTLTLFEDREMIEERLKTYAHLFDDKVMKQLKRRRYTGWGRLSRKLINGIRDKQSGKTILDFLKSDGFANRNFMQLIHDDSLTFKEDIQKAQVSGQGDSLHEHIANLAGSPAIKKGILQTVKVVDELVKVMGRHKPENIVIEMARENQTTQKGQKNSRERMKRIEEGIKELGSQILKEHPVENTQLQNEKLYLYYLQNGRDMYVDQELDINRLSDYDVDHIVPQSFLKDDSIDNKVLTRSDKNRGKSDNVPSEEVVKKMKNYWRQLLNAKLITQRKFDNLTKAERGGLSELDKAGFIKRQLVETRQITKHVAQILDSRMNTKYDENDKLIREVKVITLKSKLVSDFRKDFQFYKVREINNYHHAHDAYLNAVVGTALIKKYPKLESEFVYGDYKVYDVRKMIAKSEQEIGKATAKYFFYSNIMNFFKTEITLANGEIRKRPLIETNGETGEIVWDKGRDFATVRKVLSMPQVNIVKKTEVQTGGFSKESILPKRNSDKLIARKKDWDPKKYGGFDSPTVAYSVLVVAKVEKGKSKKLKSVKELLGITIMERSSFEKNPIDFLEAKGYKEVKKDLIIKLPKYSLFELENGRKRMLASAGELQKGNELALPSKYVNFLYLASHYEKLKGSPEDNEQKQLFVEQHKHYLDEIIEQISEFSKRVILADANLDKVLSAYNKHRDKPIREQAENIIHLFTLTNLGAPAAFKYFDTTIDRKRYTSTKEVLDATLIHQSITGLYETRIDLSQLGGDSGGSGGSGGSTNLSDIIEKETGKQLVIQESILMLPEEVEEVIGNKPESDILVHTAYDESTDENVMLLTSDAPEYKPWALVIQDSNGENKIKMLSGGSGGSGGSTNLSDIIEKETGKQLVIQESILMLPEEVEEVIGNKPESDILVHTAYDESTDENVMLLTSDAPEYKPWALVIQDSNGENKIKMLSGGSKRTADGSEFEPKKKRKV

SEQ ID NO: 557 - protein, 1853 aa, synthetic construct
MKRTADGSEFESPKKKRKVSSETGPVAVDPTLRRRIEPHEFEVFFDPRELRKETCLLYEINWGGRHSIWRHTSQNTNKHVEVNFIEKFTTERYFCPNTRCSITWFLSWSPCGECSRAITEFLSRYPHVTLFIYIARLYHHADPENRQGLEDLISSGVTIQIMTEQESGYCWRNFVNYSPSNEAHWPRYPHLWVRLYVLELYCIILGLPPCLNILRRKQPQLTFFTIALQSCHYQRLPPHILWATGLKSGGSSGGSSGSETPGTSESATPESSGGSSGGSDKKYSIGLAIGTNSVGWAVITDEYKVPSKKFKVLGNTDRHSIKKNLIGALLFDSGETAEATRLKRTARRRYTRRKNRICYLQEIFSNEMAKVDDSFFHRLEESFLVEEDKKHERHPIFGNIVDEVAYHEKYPTIYHLRKKLVDSTDKADLRLIYLALAHMIKFRGHFLIEGDLNPDNSDVDKLFIQLVQTYNQLFEENPINASGVDAKAILSARLSKSRRLENLIAQLPGEKKNGLFGNLIALSLGLTPNFKSNFDLAEDAKLQLSKDTYDDDLDNLLAQIGDQYADLFLAAKNLSDAILLSDILRVNTEITKAPLSASMIKRYDEHHQDLTLLKALVRQQLPEKYKEIFFDQSKNGYAGYIDGGASQEEFYKFIKPILEKMDGTEELLVKLNREDLLRKQRTFDNGSIPHQIHLGELHAILRRQEDFYPFLKDNREKIEKILTFRIPYYVGPLARGNSRFAWMTRKSEETITPWNFEEVVDKGASAQSFIERMTNFDKNLPNEKVLPKHSLLYEYFTVYNELTKVKYVTEGMRKPAFLSGEQKKAIVDLLFKTNRKVTVKQLKEDYFKKIECFDSVEISGVEDRFNASLGTYHDLLKIIKDKDFLDNEENEDILEDIVLTLTLFEDREMIEERLKTYAHLFDDKVMKQLKRRRYTGWGRLSRKLINGIRDKQSGKTILDFLKSDGFANRNFMQLIHDDSLTFKEDIQKAQVSGQGDSLHEHIANLAGSPAIKKGILQTVKVVDELVKVMGRHKPENIVIEMARENQTTQKGQKNSRERMKRIEEGIKELGSQILKEHPVENTQLQNEKLYLYYLQNGRDMYVDQELDINRLSDYDVDHIVPQSFLKDDSIDNKVLTRSDKNRGKSDNVPSEEVVKKMKNYWRQLLNAKLITQRKFDNLTKAERGGLSELDKAGFIKRQLVETRQITKHVAQILDSRMNTKYDENDKLIREVKVITLKSKLVSDFRKDFQFYKVREINNYHHAHDAYLNAVVGTALIKKYPKLESEFVYGDYKVYDVRKMIAKSEQEIGKATAKYFFYSNIMNFFKTEITLANGEIRKRPLIETNGETGEIVWDKGRDFATVRKVLSMPQVNIVKKTEVQTGGFSKESILPKRNSDKLIARKKDWDPKKYGGFDSPTVAYSVLVVAKVEKGKSKKLKSVKELLGITIMERSSFEKNPIDFLEAKGYKEVKKDLIIKLPKYSLFELENGRKRMLASAGELQKGNELALPSKYVNFLYLASHYEKLKGSPEDNEQKQLFVEQHKHYLDEIIEQISEFSKRVILADANLDKVLSAYNKHRDKPIREQAENIIHLFTLTNLGAPAAFKYFDTTIDRKRYTSTKEVLDATLIHQSITGLYETRIDLSQLGGDSGGSGGSGGSTNLSDIIEKETGKQLVIQESILMLPEEVEEVIGNKPESDILVHTAYDESTDENVMLLTSDAPEYKPWALVIQDSNGENKIKMLSGGSGGSGGSTNLSDIIEKETGKQLVIQESILMLPEEVEEVIGNKPESDILVHTAYDESTDENVMLLTSDAPEYKPWALVIQDSNGENKIKMLSGGSKRTADGSEFEPKKKRKV

SEQ ID NO: 558 - protein, 1853 aa, synthetic construct
MKRTADGSEFESPKKKRKVSSETGPVAVDPTLRRRIEPHEFEVFFDPRELAKETCLLYEINWGGRHSIWRHTSQNTNKHVEVNFIEKFTTERYFCPNTRCSITWFLSWSPCGECSRAITEFLSRYPHVTLFIYIARLYHHADPRNRQGLRDLISSGVTIQIMTEQESGYCWRNFVNYSPSNEAHWPRYPHLWVRLYVLELYCIILGLPPCLNILRRKQPQLTFFTIALQSCHYQRLPPHILWATGLKSGGSSGGSSGSETPGTSESATPESSGGSSGGSDKKYSIGLAIGTNSVGWAVITDEYKVPSKKFKVLGNTDRHSIKKNLIGALLFDSGETAEATRLKRTARRRYTRRKNRICYLQEIFSNEMAKVDDSFFHRLEESFLVEEDKKHERHPIFGNIVDEVAYHEKYPTIYHLRKKLVDSTDKADLRLIYLALAHMIKFRGHFLIEGDLNPDNSDVDKLFIQLVQTYNQLFEENPINASGVDAKAILSARLSKSRRLENLIAQLPGEKKNGLFGNLIALSLGLTPNFKSNFDLAEDAKLQLSKDTYDDDLDNLLAQIGDQYADLFLAAKNLSDAILLSDILRVNTEITKAPLSASMIKRYDEHHQDLTLLKALVRQQLPEKYKEIFFDQSKNGYAGYIDGGASQEEFYKFIKPILEKMDGTEELLVKLNREDLLRKQRTFDNGSIPHQIHLGELHAILRRQEDFYPFLKDNREKIEKILTFRIPYYVGPLARGNSRFAWMTRKSEETITPWNFEEVVDKGASAQSFIERMTNFDKNLPNEKVLPKHSLLYEYFTVYNELTKVKYVTEGMRKPAFLSGEQKKAIVDLLFKTNRKVTVKQLKEDYFKKIECFDSVEISGVEDRFNASLGTYHDLLKIIKDKDFLDNEENEDILEDIVLTLTLFEDREMIEERLKTYAHLFDDKVMKQLKRRRYTGWGRLSRKLINGIRDKQSGKTILDFLKSDGFANRNFMQLIHDDSLTFKEDIQKAQVSGQGDSLHEHIANLAGSPAIKKGILQTVKVVDELVKVMGRHKPENIVIEMARENQTTQKGQKNSRERMKRIEEGIKELGSQILKEHPVENTQLQNEKLYLYYLQNGRDMYVDQELDINRLSDYDVDHIVPQSFLKDDSIDNKVLTRSDKNRGKSDNVPSEEVVKKMKNYWRQLLNAKLITQRKFDNLTKAERGGLSELDKAGFIKRQLVETRQITKHVAQILDSRMNTKYDENDKLIREVKVITLKSKLVSDFRKDFQFYKVREINNYHHAHDAYLNAVVGTALIKKYPKLESEFVYGDYKVYDVRKMIAKSEQEIGKATAKYFFYSNIMNFFKTEITLANGEIRKRPLIETNGETGEIVWDKGRDFATVRKVLSMPQVNIVKKTEVQTGGFSKESILPKRNSDKLIARKKDWDPKKYGGFDSPTVAYSVLVVAKVEKGKSKKLKSVKELLGITIMERSSFEKNPIDFLEAKGYKEVKKDLIIKLPKYSLFELENGRKRMLASAGELQKGNELALPSKYVNFLYLASHYEKLKGSPEDNEQKQLFVEQHKHYLDEIIEQISEFSKRVILADANLDKVLSAYNKHRDKPIREQAENIIHLFTLTNLGAPAAFKYFDTTIDRKRYTSTKEVLDATLIHQSITGLYETRIDLSQLGGDSGGSGGSGGSTNLSDIIEKETGKQLVIQESILMLPEEVEEVIGNKPESDILVHTAYDESTDENVMLLTSDAPEYKPWALVIQDSNGENKIKMLSGGSGGSGGSTNLSDIIEKETGKQLVIQESILMLPEEVEEVIGNKPESDILVHTAYDESTDENVMLLTSDAPEYKPWALVIQDSNGENKIKMLSGGSKRTADGSEFEPKKKRKV

SEQ ID NO: 559 - protein, 1853 aa, synthetic construct
MKRTADGSEFESPKKKRKVSSETGPVAVDPTLRRRIEPHEFEVFFDPRELAAETCLLYEINWGGRHSIWRHTSQNTNKHVEVNFIEKFTTERYFCPNTRCSITWFLSWSPCGECSRAITEFLSRYPHVTLFIYIARLYHHADPRNRQGLRDLISSGVTIQIMTEQESGYCWRNFVNYSPSNEAHWPRYPHLWVRLYVLELYCIILGLPPCLNILRRKQPQLTFFTIALQSCHYQRLPPHILWATGLKSGGSSGGSSGSETPGTSESATPESSGGSSGGSDKKYSIGLAIGTNSVGWAVITDEYKVPSKKFKVLGNTDRHSIKKNLIGALLFDSGETAEATRLKRTARRRYTRRKNRICYLQEIFSNEMAKVDDSFFHRLEESFLVEEDKKHERHPIFGNIVDEVAYHEKYPTIYHLRKKLVDSTDKADLRLIYLALAHMIKFRGHFLIEGDLNPDNSDVDKLFIQLVQTYNQLFEENPINASGVDAKAILSARLSKSRRLENLIAQLPGEKKNGLFGNLIALSLGLTPNFKSNFDLAEDAKLQLSKDTYDDDLDNLLAQIGDQYADLFLAAKNLSDAILLSDILRVNTEITKAPLSASMIKRYDEHHQDLTLLKALVRQQLPEKYKEIFFDQSKNGYAGYIDGGASQEEFYKFIKPILEKMDGTEELLVKLNREDLLRKQRTFDNGSIPHQIHLGELHAILRRQEDFYPFLKDNREKIEKILTFRIPYYVGPLARGNSRFAWMTRKSEETITPWNFEEVVDKGASAQSFIERMTNFDKNLPNEKVLPKHSLLYEYFTVYNELTKVKYVTEGMRKPAFLSGEQKKAIVDLLFKTNRKVTVKQLKEDYFKKIECFDSVEISGVEDRFNASLGTYHDLLKIIKDKDFLDNEENEDILEDIVLTLTLFEDREMIEERLKTYAHLFDDKVMKQLKRRRYTGWGRLSRKLINGIRDKQSGKTILDFLKSDGFANRNFMQLIHDDSLTFKEDIQKAQVSGQGDSLHEHIANLAGSPAIKKGILQTVKVVDELVKVMGRHKPENIVIEMARENQTTQKGQKNSRERMKRIEEGIKELGSQILKEHPVENTQLQNEKLYLYYLQNGRDMYVDQELDINRLSDYDVDHIVPQSFLKDDSIDNKVLTRSDKNRGKSDNVPSEEVVKKMKNYWRQLLNAKLITQRKFDNLTKAERGGLSELDKAGFIKRQLVETRQITKHVAQILDSRMNTKYDENDKLIREVKVITLKSKLVSDFRKDFQFYKVREINNYHHAHDAYLNAVVGTALIKKYPKLESEFVYGDYKVYDVRKMIAKSEQEIGKATAKYFFYSNIMNFFKTEITLANGEIRKRPLIETNGETGEIVWDKGRDFATVRKVLSMPQVNIVKKTEVQTGGFSKESILPKRNSDKLIARKKDWDPKKYGGFDSPTVAYSVLVVAKVEKGKSKKLKSVKELLGITIMERSSFEKNPIDFLEAKGYKEVKKDLIIKLPKYSLFELENGRKRMLASAGELQKGNELALPSKYVNFLYLASHYEKLKGSPEDNEQKQLFVEQHKHYLDEIIEQISEFSKRVILADANLDKVLSAYNKHRDKPIREQAENIIHLFTLTNLGAPAAFKYFDTTIDRKRYTSTKEVLDATLIHQSITGLYETRIDLSQLGGDSGGSGGSGGSTNLSDIIEKETGKQLVIQESILMLPEEVEEVIGNKPESDILVHTAYDESTDENVMLLTSDAPEYKPWALVIQDSNGENKIKMLSGGSGGSGGSTNLSDIIEKETGKQLVIQESILMLPEEVEEVIGNKPESDILVHTAYDESTDENVMLLTSDAPEYKPWALVIQDSNGENKIKMLSGGSKRTADGSEFEPKKKRKV

SEQ ID NO: 560 - protein, 1824 aa, synthetic construct
MKRTADGSEFESPKKKRKVSEASPASGPRHLMDPHIFTSNFNNGIGRHKTYLCYEVERLDNGTSVKMDQHRGFLHNQAKNLLCGFYGRHAELRFLDLVPSLQLDPAQIYRVTWFISWSPCFSWGCAGEVRAFLQENTHVRLRIFAARIYDYDPLYKEALQMLRDAGAQVSIMTYDEFKHCWDTFVDHQGCPFQPWDGLDEHSQALSGRLRAILQNQGNSGGSSGGSSGSETPGTSESATPESSGGSSGGSDKKYSIGLAIGTNSVGWAVITDEYKVPSKKFKVLGNTDRHSIKKNLIGALLFDSGETAEATRLKRTARRRYTRRKNRICYLQEIFSNEMAKVDDSFFHRLEESFLVEEDKKHERHPIFGNIVDEVAYHEKYPTIYHLRKKLVDSTDKADLRLIYLALAHMIKFRGHFLIEGDLNPDNSDVDKLFIQLVQTYNQLFEENPINASGVDAKAILSARLSKSRRLENLIAQLPGEKKNGLFGNLIALSLGLTPNFKSNFDLAEDAKLQLSKDTYDDDLDNLLAQIGDQYADLFLAAKNLSDAILLSDILRVNTEITKAPLSASMIKRYDEHHQDLTLLKALVRQQLPEKYKEIFFDQSKNGYAGYIDGGASQEEFYKFIKPILEKMDGTEELLVKLNREDLLRKQRTFDNGSIPHQIHLGELHAILRRQEDFYPFLKDNREKIEKILTFRIPYYVGPLARGNSRFAWMTRKSEETITPWNFEEVVDKGASAQSFIERMTNFDKNLPNEKVLPKHSLLYEYFTVYNELTKVKYVTEGMRKPAFLSGEQKKAIVDLLFKTNRKVTVKQLKEDYFKKIECFDSVEISGVEDRFNASLGTYHDLLKIIKDKDFLDNEENEDILEDIVLTLTLFEDREMIEERLKTYAHLFDDKVMKQLKRRRYTGWGRLSRKLINGIRDKQSGKTILDFLKSDGFANRNFMQLIHDDSLTFKEDIQKAQVSGQGDSLHEHIANLAGSPAIKKGILQTVKVVDELVKVMGRHKPENIVIEMARENQTTQKGQKNSRERMKRIEEGIKELGSQILKEHPVENTQLQNEKLYLYYLQNGRDMYVDQELDINRLSDYDVDHIVPQSFLKDDSIDNKVLTRSDKNRGKSDNVPSEEVVKKMKNYWRQLLNAKLITQRKFDNLTKAERGGLSELDKAGFIKRQLVETRQITKHVAQILDSRMNTKYDENDKLIREVKVITLKSKLVSDFRKDFQFYKVREINNYHHAHDAYLNAVVGTALIKKYPKLESEFVYGDYKVYDVRKMIAKSEQEIGKATAKYFFYSNIMNFFKTEITLANGEIRKRPLIETNGETGEIVWDKGRDFATVRKVLSMPQVNIVKKTEVQTGGFSKESILPKRNSDKLIARKKDWDPKKYGGFDSPTVAYSVLVVAKVEKGKSKKLKSVKELLGITIMERSSFEKNPIDFLEAKGYKEVKKDLIIKLPKYSLFELENGRKRMLASAGELQKGNELALPSKYVNFLYLASHYEKLKGSPEDNEQKQLFVEQHKHYLDEIIEQISEFSKRVILADANLDKVLSAYNKHRDKPIREQAENIIHLFTLTNLGAPAAFKYFDTTIDRKRYTSTKEVLDATLIHQSITGLYETRIDLSQLGGDSGGSGGSGGSTNLSDIIEKETGKQLVIQESILMLPEEVEEVIGNKPESDILVHTAYDESTDENVMLLTSDAPEYKPWALVIQDSNGENKIKMLSGGSGGSGGSTNLSDIIEKETGKQLVIQESILMLPEEVEEVIGNKPESDILVHTAYDESTDENVMLLTSDAPEYKPWALVIQDSNGENKIKMLSGGSKRTADGSEFEPKKKRKV

SEQ ID NO: 561 - protein, 2006 aa, synthetic construct
MKRTADGSEFESPKKKRKVNPQIRNPMERMYRDTFYDNFENEPILYGRSYTWLCYEVKIKRGRSNLLWDTGVFRGQVYFKPQYHAEMCFLSWFCGNQLPAYKCFQITWFVSWTPCPDCVAKLAEFLSEHPNVTLTISAARLYYYWERDYRRALCRLSQAGARVTIMDYEEFAYCWENFVYNEGQQFMPWYKFDENYAFLHRTLKEILRYLMDPDTFTFNFNNDPLVLRRRQTYLCYEVERLDNGTWVLMDQHMGFLCNEAKNLLCGFYGRHAELRFLDLVPSLQLDPAQIYRVTWFISWSPCFSWGCAGEVRAFLQENTHVRLRIFAARIYDYDPLYKEALQMLRDAGAQVSIMTYDEFEYCWDTFVYRQGCPFQPWDGLEEHSQALSGRLRAILQNQGNSGGSSGGSSGSETPGTSESATPESSGGSSGGSDKKYSIGLAIGTNSVGWAVITDEYKVPSKKFKVLGNTDRHSIKKNLIGALLFDSGETAEATRLKRTARRRYTRRKNRICYLQEIFSNEMAKVDDSFFHRLEESFLVEEDKKHERHPIFGNIVDEVAYHEKYPTIYHLRKKLVDSTDKADLRLIYLALAHMIKFRGHFLIEGDLNPDNSDVDKLFIQLVQTYNQLFEENPINASGVDAKAILSARLSKSRRLENLIAQLPGEKKNGLFGNLIALSLGLTPNFKSNFDLAEDAKLQLSKDTYDDDLDNLLAQIGDQYADLFLAAKNLSDAILLSDILRVNTEITKAPLSASMIKRYDEHHQDLTLLKALVRQQLPEKYKEIFFDQSKNGYAGYIDGGASQEEFYKFIKPILEKMDGTEELLVKLNREDLLRKQRTFDNGSIPHQIHLGELHAILRRQEDFYPFLKDNREKIEKILTFRIPYYVGPLARGNSRFAWMTRKSEETITPWNFEEVVDKGASAQSFIERMTNFDKNLPNEKVLPKHSLLYEYFTVYNELTKVKYVTEGMRKPAFLSGEQKKAIVDLLFKTNRKVTVKQLKEDYFKKIECFDSVEISGVEDRFNASLGTYHDLLKIIKDKDFLDNEENEDILEDIVLTLTLFEDREMIEERLKTYAHLFDDKVMKQLKRRRYTGWGRLSRKLINGIRDKQSGKTILDFLKSDGFANRNFMQLIHDDSLTFKEDIQKAQVSGQGDSLHEHIANLAGSPAIKKGILQTVKVVDELVKVMGRHKPENIVIEMARENQTTQKGQKNSRERMKRIEEGIKELGSQILKEHPVENTQLQNEKLYLYYLQNGRDMYVDQELDINRLSDYDVDHIVPQSFLKDDSIDNKVLTRSDKNRGKSDNVPSEEVVKKMKNYWRQLLNAKLITQRKFDNLTKAERGGLSELDKAGFIKRQLVETRQITKHVAQILDSRMNTKYDENDKLIREVKVITLKSKLVSDFRKDFQFYKVREINNYHHAHDAYLNAVVGTALIKKYPKLESEFVYGDYKVYDVRKMIAKSEQEIGKATAKYFFYSNIMNFFKTEITLANGEIRKRPLIETNGETGEIVWDKGRDFATVRKVLSMPQVNIVKKTEVQTGGFSKESILPKRNSDKLIARKKDWDPKKYGGFDSPTVAYSVLVVAKVEKGKSKKLKSVKELLGITIMERSSFEKNPIDFLEAKGYKEVKKDLIIKLPKYSLFELENGRKRMLASAGELQKGNELALPSKYVNFLYLASHYEKLKGSPEDNEQKQLFVEQHKHYLDEIIEQISEFSKRVILADANLDKVLSAYNKHRDKPIREQAENIIHLFTLTNLGAPAAFKYFDTTIDRKRYTSTKEVLDATLIHQSITGLYETRIDLSQLGGDSGGSGGSGGSTNLSDIIEKETGKQLVIQESILMLPEEVEEVIGNKPESDILVHTAYDESTDENVMLLTSDAPEYKPWALVIQDSNGENKIKMLSGGSGGSGGSTNLSDIIEKETGKQLVIQESILMLPEEVEEVIGNKPESDILVHTAYDESTDENVMLLTSDAPEYKPWALVIQDSNGENKIKMLSGGSKRTADGSEFEPKKKRKV

SEQ ID NO: 562 - protein, 2008 aa, synthetic construct
MKRTADGSEFESPKKKRKVKPHFRNTVERMYRDTFSYNFYNRPILSRRNTVWLCYEVKTKGPSRPPLDAKIFRGQVYSELKYHPEMRFFHWFSKWRKLHRDQEYEVTWYISWSPCTKCTRDMATFLAEDPKVTLTIFVARLYYFWDPDYQEALRSLCQKRDGPRATMKIMNYDEFQHCWSKFVYSQRELFEPWNNLPKYYILLHIMLGEILRHSMDPPTFTFNFNNEPWVRGRHETYLCYEVERMHNDTWVLLNQRRGFLCNQAPHKHGFLEGRHAELCFLDVIPFWKLDLDQDYRVTCFTSWSPCFSCAQEMAKFISKNKHVSLCIFTARIYDDQGRCQEGLRTLAEAGAKISIMTYSEFKHCWDTFVDHQGCPFQPWDGLDEHSQDLSGRLRAILQNQENSGGSSGGSSGSETPGTSESATPESSGGSSGGSDKKYSIGLAIGTNSVGWAVITDEYKVPSKKFKVLGNTDRHSIKKNLIGALLFDSGETAEATRLKRTARRRYTRRKNRICYLQEIFSNEMAKVDDSFFHRLEESFLVEEDKKHERHPIFGNIVDEVAYHEKYPTIYHLRKKLVDSTDKADLRLIYLALAHMIKFRGHFLIEGDLNPDNSDVDKLFIQLVQTYNQLFEENPINASGVDAKAILSARLSKSRRLENLIAQLPGEKKNGLFGNLIALSLGLTPNFKSNFDLAEDAKLQLSKDTYDDDLDNLLAQIGDQYADLFLAAKNLSDAILLSDILRVNTEITKAPLSASMIKRYDEHHQDLTLLKALVRQQLPEKYKEIFFDQSKNGYAGYIDGGASQEEFYKFIKPILEKMDGTEELLVKLNREDLLRKQRTFDNGSIPHQIHLGELHAILRRQEDFYPFLKDNREKIEKILTFRIPYYVGPLARGNSRFAWMTRKSEETITPWNFEEVVDKGASAQSFIERMTNFDKNLPNEKVLPKHSLLYEYFTVYNELTKVKYVTEGMRKPAFLSGEQKKAIVDLLFKTNRKVTVKQLKEDYFKKIECFDSVEISGVEDRFNASLGTYHDLLKIIKDKDFLDNEENEDILEDIVLTLTLFEDREMIEERLKTYAHLFDDKVMKQLKRRRYTGWGRLSRKLINGIRDKQSGKTILDFLKSDGFANRNFMQLIHDDSLTFKEDIQKAQVSGQGDSLHEHIANLAGSPAIKKGILQTVKVVDELVKVMGRHKPENIVIEMARENQTTQKGQKNSRERMKRIEEGIKELGSQILKEHPVENTQLQNEKLYLYYLQNGRDMYVDQELDINRLSDYDVDHIVPQSFLKDDSIDNKVLTRSDKNRGKSDNVPSEEVVKKMKNYWRQLLNAKLITQRKFDNLTKAERGGLSELDKAGFIKRQLVETRQITKHVAQILDSRMNTKYDENDKLIREVKVITLKSKLVSDFRKDFQFYKVREINNYHHAHDAYLNAVVGTALIKKYPKLESEFVYGDYKVYDVRKMIAKSEQEIGKATAKYFFYSNIMNFFKTEITLANGEIRKRPLIETNGETGEIVWDKGRDFATVRKVLSMPQVNIVKKTEVQTGGFSKESILPKRNSDKLIARKKDWDPKKYGGFDSPTVAYSVLVVAKVEKGKSKKLKSVKELLGITIMERSSFEKNPIDFLEAKGYKEVKKDLIIKLPKYSLFELENGRKRMLASAGELQKGNELALPSKYVNFLYLASHYEKLKGSPEDNEQKQLFVEQHKHYLDEIIEQISEFSKRVILADANLDKVLSAYNKHRDKPIREQAENIIHLFTLTNLGAPAAFKYFDTTIDRKRYTSTKEVLDATLIHQSITGLYETRIDLSQLGGDSGGSGGSGGSTNLSDIIEKETGKQLVIQESILMLPEEVEEVIGNKPESDILVHTAYDESTDENVMLLTSDAPEYKPWALVIQDSNGENKIKMLSGGSGGSGGSTNLSDIIEKETGKQLVIQESILMLPEEVEEVIGNKPESDILVHTAYDESTDENVMLLTSDAPEYKPWALVIQDSNGENKIKMLSGGSKRTADGSEFEPKKKRKV

SEQ ID NO: 563 - protein, 1822 aa, synthetic construct
MKRTADGSEFESPKKKRKVDSLLMNRRKFLYQFKNVRWAKGRRETYLCYVVKRRDSATSFSLDFGYLRNKNGCHVELLFLRYISDWDLDPGRCYRVTWFTSWSPCYDCARHVADFLRGNPNLSLRIFTARLYFCEDRKAEPEGLRRLHRAGVQIAIMTFKDYFYCWNTFVENHERTFKAWEGLHENSVRLSRQLRRILLPLYEVDDLRDAFRTLGLSGGSSGGSSGSETPGTSESATPESSGGSSGGSDKKYSIGLAIGTNSVGWAVITDEYKVPSKKFKVLGNTDRHSIKKNLIGALLFDSGETAEATRLKRTARRRYTRRKNRICYLQEIFSNEMAKVDDSFFHRLEESFLVEEDKKHERHPIFGNIVDEVAYHEKYPTIYHLRKKLVDSTDKADLRLIYLALAHMIKFRGHFLIEGDLNPDNSDVDKLFIQLVQTYNQLFEENPINASGVDAKAILSARLSKSRRLENLIAQLPGEKKNGLFGNLIALSLGLTPNFKSNFDLAEDAKLQLSKDTYDDDLDNLLAQIGDQYADLFLAAKNLSDAILLSDILRVNTEITKAPLSASMIKRYDEHHQDLTLLKALVRQQLPEKYKEIFFDQSKNGYAGYIDGGASQEEFYKFIKPILEKMDGTEELLVKLNREDLLRKQRTFDNGSIPHQIHLGELHAILRRQEDFYPFLKDNREKIEKILTFRIPYYVGPLARGNSRFAWMTRKSEETITPWNFEEVVDKGASAQSFIERMTNFDKNLPNEKVLPKHSLLYEYFTVYNELTKVKYVTEGMRKPAFLSGEQKKAIVDLLFKTNRKVTVKQLKEDYFKKIECFDSVEISGVEDRFNASLGTYHDLLKIIKDKDFLDNEENEDILEDIVLTLTLFEDREMIEERLKTYAHLFDDKVMKQLKRRRYTGWGRLSRKLINGIRDKQSGKTILDFLKSDGFANRNFMQLIHDDSLTFKEDIQKAQVSGQGDSLHEHIANLAGSPAIKKGILQTVKVVDELVKVMGRHKPENIVIEMARENQTTQKGQKNSRERMKRIEEGIKELGSQILKEHPVENTQLQNEKLYLYYLQNGRDMYVDQELDINRLSDYDVDHIVPQSFLKDDSIDNKVLTRSDKNRGKSDNVPSEEVVKKMKNYWRQLLNAKLITQRKFDNLTKAERGGLSELDKAGFIKRQLVETRQITKHVAQILDSRMNTKYDENDKLIREVKVITLKSKLVSDFRKDFQFYKVREINNYHHAHDAYLNAVVGTALIKKYPKLESEFVYGDYKVYDVRKMIAKSEQEIGKATAKYFFYSNIMNFFKTEITLANGEIRKRPLIETNGETGEIVWDKGRDFATVRKVLSMPQVNIVKKTEVQTGGFSKESILPKRNSDKLIARKKDWDPKKYGGFDSPTVAYSVLVVAKVEKGKSKKLKSVKELLGITIMERSSFEKNPIDFLEAKGYKEVKKDLIIKLPKYSLFELENGRKRMLASAGELQKGNELALPSKYVNFLYLASHYEKLKGSPEDNEQKQLFVEQHKHYLDEIIEQISEFSKRVILADANLDKVLSAYNKHRDKPIREQAENIIHLFTLTNLGAPAAFKYFDTTIDRKRYTSTKEVLDATLIHQSITGLYETRIDLSQLGGDSGGSGGSGGSTNLSDIIEKETGKQLVIQESILMLPEEVEEVIGNKPESDILVHTAYDESTDENVMLLTSDAPEYKPWALVIQDSNGENKIKMLSGGSGGSGGSTNLSDIIEKETGKQLVIQESILMLPEEVEEVIGNKPESDILVHTAYDESTDENVMLLTSDAPEYKPWALVIQDSNGENKIKMLSGGSKRTADGSEFEPKKKRKV

SEQ ID NO: 564 - protein, 1832 aa, synthetic construct
MKRTADGSEFESPKKKRKVTDAEYVRIHEKLDIYTFKKQFFNNKKSVSHRCYVLFELKRRGERRACFWGYAVNKPQSGTERGIHAEIFSIRKVEEYLRDNPGQFTINWYSSWSPCADCAEKILEWYNQELRGNGHTLKIWACKLYYEKNARNQIGLWNLRDNGVGLNVMVSEHYQCCRKIFIQSSHNQLNENRWLEKTLKRAEKRRSELSIMIQVKILHTTKSPAVSGGSSGGSSGSETPGTSESATPESSGGSSGGSDKKYSIGLAIGTNSVGWAVITDEYKVPSKKFKVLGNTDRHSIKKNLIGALLFDSGETAEATRLKRTARRRYTRRKNRICYLQEIFSNEMAKVDDSFFHRLEESFLVEEDKKHERHPIFGNIVDEVAYHEKYPTIYHLRKKLVDSTDKADLRLIYLALAHMIKFRGHFLIEGDLNPDNSDVDKLFIQLVQTYNQLFEENPINASGVDAKAILSARLSKSRRLENLIAQLPGEKKNGLFGNLIALSLGLTPNFKSNFDLAEDAKLQLSKDTYDDDLDNLLAQIGDQYADLFLAAKNLSDAILLSDILRVNTEITKAPLSASMIKRYDEHHQDLTLLKALVRQQLPEKYKEIFFDQSKNGYAGYIDGGASQEEFYKFIKPILEKMDGTEELLVKLNREDLLRKQRTFDNGSIPHQIHLGELHAILRRQEDFYPFLKDNREKIEKILTFRIPYYVGPLARGNSRFAWMTRKSEETITPWNFEEVVDKGASAQSFIERMTNFDKNLPNEKVLPKHSLLYEYFTVYNELTKVKYVTEGMRKPAFLSGEQKKAIVDLLFKTNRKVTVKQLKEDYFKKIECFDSVEISGVEDRFNASLGTYHDLLKIIKDKDFLDNEENEDILEDIVLTLTLFEDREMIEERLKTYAHLFDDKVMKQLKRRRYTGWGRLSRKLINGIRDKQSGKTILDFLKSDGFANRNFMQLIHDDSLTFKEDIQKAQVSGQGDSLHEHIANLAGSPAIKKGILQTVKVVDELVKVMGRHKPENIVIEMARENQTTQKGQKNSRERMKRIEEGIKELGSQILKEHPVENTQLQNEKLYLYYLQNGRDMYVDQELDINRLSDYDVDHIVPQSFLKDDSIDNKVLTRSDKNRGKSDNVPSEEVVKKMKNYWRQLLNAKLITQRKFDNLTKAERGGLSELDKAGFIKRQLVETRQITKHVAQILDSRMNTKYDENDKLIREVKVITLKSKLVSDFRKDFQFYKVREINNYHHAHDAYLNAVVGTALIKKYPKLESEFVYGDYKVYDVRKMIAKSEQEIGKATAKYFFYSNIMNFFKTEITLANGEIRKRPLIETNGETGEIVWDKGRDFATVRKVLSMPQVNIVKKTEVQTGGFSKESILPKRNSDKLIARKKDWDPKKYGGFDSPTVAYSVLVVAKVEKGKSKKLKSVKELLGITIMERSSFEKNPIDFLEAKGYKEVKKDLIIKLPKYSLFELENGRKRMLASAGELQKGNELALPSKYVNFLYLASHYEKLKGSPEDNEQKQLFVEQHKHYLDEIIEQISEFSKRVILADANLDKVLSAYNKHRDKPIREQAENIIHLFTLTNLGAPAAFKYFDTTIDRKRYTSTKEVLDATLIHQSITGLYETRIDLSQLGGDSGGSGGSGGSTNLSDIIEKETGKQLVIQESILMLPEEVEEVIGNKPESDILVHTAYDESTDENVMLLTSDAPEYKPWALVIQDSNGENKIKMLSGGSGGSGGSTNLSDIIEKETGKQLVIQESILMLPEEVEEVIGNKPESDILVHTAYDESTDENVMLLTSDAPEYKPWALVIQDSNGENKIKMLSGGSKRTADGSEFEPKKKRKV

SEQ ID NO: 565 - protein, 1786 aa, synthetic construct
MKRTADGSEFESPKKKRKVFERNYDPRELRKETYLLYEIKWGKSGKLWRHWCQNNRTQHAEVYFLENIFNARRFNPSTHCSITWYLSWSPCAECSQKIVDFLKEHPNVNLEIYVARLYYHEDERNRQGLRDLVNSGVTIRIMDLPDYNYCWKTFVSDQGGDEDYWPGHFAPWIKQYSLKLSGGSSGGSSGSETPGTSESATPESSGGSSGGSDKKYSIGLAIGTNSVGWAVITDEYKVPSKKFKVLGNTDRHSIKKNLIGALLFDSGETAEATRLKRTARRRYTRRKNRICYLQEIFSNEMAKVDDSFFHRLEESFLVEEDKKHERHPIFGNIVDEVAYHEKYPTIYHLRKKLVDSTDKADLRLIYLALAHMIKFRGHFLIEGDLNPDNSDVDKLFIQLVQTYNQLFEENPINASGVDAKAILSARLSKSRRLENLIAQLPGEKKNGLFGNLIALSLGLTPNFKSNFDLAEDAKLQLSKDTYDDDLDNLLAQIGDQYADLFLAAKNLSDAILLSDILRVNTEITKAPLSASMIKRYDEHHQDLTLLKALVRQQLPEKYKEIFFDQSKNGYAGYIDGGASQEEFYKFIKPILEKMDGTEELLVKLNREDLLRKQRTFDNGSIPHQIHLGELHAILRRQEDFYPFLKDNREKIEKILTFRIPYYVGPLARGNSRFAWMTRKSEETITPWNFEEVVDKGASAQSFIERMTNFDKNLPNEKVLPKHSLLYEYFTVYNELTKVKYVTEGMRKPAFLSGEQKKAIVDLLFKTNRKVTVKQLKEDYFKKIECFDSVEISGVEDRFNASLGTYHDLLKIIKDKDFLDNEENEDILEDIVLTLTLFEDREMIEERLKTYAHLFDDKVMKQLKRRRYTGWGRLSRKLINGIRDKQSGKTILDFLKSDGFANRNFMQLIHDDSLTFKEDIQKAQVSGQGDSLHEHIANLAGSPAIKKGILQTVKVVDELVKVMGRHKPENIVIEMARENQTTQKGQKNSRERMKRIEEGIKELGSQILKEHPVENTQLQNEKLYLYYLQNGRDMYVDQELDINRLSDYDVDHIVPQSFLKDDSIDNKVLTRSDKNRGKSDNVPSEEVVKKMKNYWRQLLNAKLITQRKFDNLTKAERGGLSELDKAGFIKRQLVETRQITKHVAQILDSRMNTKYDENDKLIREVKVITLKSKLVSDFRKDFQFYKVREINNYHHAHDAYLNAVVGTALIKKYPKLESEFVYGDYKVYDVRKMIAKSEQEIGKATAKYFFYSNIMNFFKTEITLANGEIRKRPLIETNGETGEIVWDKGRDFATVRKVLSMPQVNIVKKTEVQTGGFSKESILPKRNSDKLIARKKDWDPKKYGGFDSPTVAYSVLVVAKVEKGKSKKLKSVKELLGITIMERSSFEKNPIDFLEAKGYKEVKKDLIIKLPKYSLFELENGRKRMLASAGELQKGNELALPSKYVNFLYLASHYEKLKGSPEDNEQKQLFVEQHKHYLDEIIEQISEFSKRVILADANLDKVLSAYNKHRDKPIREQAENIIHLFTLTNLGAPAAFKYFDTTIDRKRYTSTKEVLDATLIHQSITGLYETRIDLSQLGGDSGGSGGSGGSTNLSDIIEKETGKQLVIQESILMLPEEVEEVIGNKPESDILVHTAYDESTDENVMLLTSDAPEYKPWALVIQDSNGENKIKMLSGGSGGSGGSTNLSDIIEKETGKQLVIQESILMLPEEVEEVIGNKPESDILVHTAYDESTDENVMLLTSDAPEYKPWALVIQDSNGENKIKMLSGGSKRTADGSEFEPKKKRKV

SEQ ID NO: 566 - protein, 1823 aa, synthetic construct
MKRTADGSEFESPKKKRKVEASPASGPRHLMDPHIFTSNFNNGIGRHKTYLCYEVERLDNGTSVKMDQHRGFLHGQAKNLLCGFYGRHAELRFLDLVPSLQLDPAQIYRVTWFISWSPCFSWGCAGEVRAFLQENTHVRLRIFAARIYDYDPLYKEALQMLRDAGAQVSIMTYDEFKHCWDTFVDHQGCPFQPWDGLDEHSQALSGRLRAILQNQGNSGGSSGGSSGSETPGTSESATPESSGGSSGGSDKKYSIGLAIGTNSVGWAVITDEYKVPSKKFKVLGNTDRHSIKKNLIGALLFDSGETAEATRLKRTARRRYTRRKNRICYLQEIFSNEMAKVDDSFFHRLEESFLVEEDKKHERHPIFGNIVDEVAYHEKYPTIYHLRKKLVDSTDKADLRLIYLALAHMIKFRGHFLIEGDLNPDNSDVDKLFIQLVQTYNQLFEENPINASGVDAKAILSARLSKSRRLENLIAQLPGEKKNGLFGNLIALSLGLTPNFKSNFDLAEDAKLQLSKDTYDDDLDNLLAQIGDQYADLFLAAKNLSDAILLSDILRVNTEITKAPLSASMIKRYDEHHQDLTLLKALVRQQLPEKYKEIFFDQSKNGYAGYIDGGASQEEFYKFIKPILEKMDGTEELLVKLNREDLLRKQRTFDNGSIPHQIHLGELHAILRRQEDFYPFLKDNREKIEKILTFRIPYYVGPLARGNSRFAWMTRKSEETITPWNFEEVVDKGASAQSFIERMTNFDKNLPNEKVLPKHSLLYEYFTVYNELTKVKYVTEGMRKPAFLSGEQKKAIVDLLFKTNRKVTVKQLKEDYFKKIECFDSVEISGVEDRFNASLGTYHDLLKIIKDKDFLDNEENEDILEDIVLTLTLFEDREMIEERLKTYAHLFDDKVMKQLKRRRYTGWGRLSRKLINGIRDKQSGKTILDFLKSDGFANRNFMQLIHDDSLTFKEDIQKAQVSGQGDSLHEHIANLAGSPAIKKGILQTVKVVDELVKVMGRHKPENIVIEMARENQTTQKGQKNSRERMKRIEEGIKELGSQILKEHPVENTQLQNEKLYLYYLQNGRDMYVDQELDINRLSDYDVDHIVPQSFLKDDSIDNKVLTRSDKNRGKSDNVPSEEVVKKMKNYWRQLLNAKLITQRKFDNLTKAERGGLSELDKAGFIKRQLVETRQITKHVAQILDSRMNTKYDENDKLIREVKVITLKSKLVSDFRKDFQFYKVREINNYHHAHDAYLNAVVGTALIKKYPKLESEFVYGDYKVYDVRKMIAKSEQEIGKATAKYFFYSNIMNFFKTEITLANGEIRKRPLIETNGETGEIVWDKGRDFATVRKVLSMPQVNIVKKTEVQTGGFSKESILPKRNSDKLIARKKDWDPKKYGGFDSPTVAYSVLVVAKVEKGKSKKLKSVKELLGITIMERSSFEKNPIDFLEAKGYKEVKKDLIIKLPKYSLFELENGRKRMLASAGELQKGNELALPSKYVNFLYLASHYEKLKGSPEDNEQKQLFVEQHKHYLDEIIEQISEFSKRVILADANLDKVLSAYNKHRDKPIREQAENIIHLFTLTNLGAPAAFKYFDTTIDRKRYTSTKEVLDATLIHQSITGLYETRIDLSQLGGDSGGSGGSGGSTNLSDIIEKETGKQLVIQESILMLPEEVEEVIGNKPESDILVHTAYDESTDENVMLLTSDAPEYKPWALVIQDSNGENKIKMLSGGSGGSGGSTNLSDIIEKETGKQLVIQESILMLPEEVEEVIGNKPESDILVHTAYDESTDENVMLLTSDAPEYKPWALVIQDSNGENKIKMLSGGSKRTADGSEFEPKKKRKV

SEQ ID NO: 567 - protein, 1853 aa, synthetic construct
MKRTADGSEFESPKKKRKVSSETGPVAVDPTLRRRIEPHEFEVFFDPRELAAETCLLYEINWGGRHSIWRHTSQNTNKHVEVNFIEKFTTERYFCPNTRCSITWFLSWSPCGECSRAITEFLSRYPHVTLFIYIARLYHLANPRNRQGLRDLISSGVTIQIMTEQESGYCWRNFVNYSPSNEAHWPRYPHLWVRLYVLELYCIILGLPPCLNILRRKQPQLTFFTIALQSCHYQRLPPHILWATGLKSGGSSGGSSGSETPGTSESATPESSGGSSGGSDKKYSIGLAIGTNSVGWAVITDEYKVPSKKFKVLGNTDRHSIKKNLIGALLFDSGETAEATRLKRTARRRYTRRKNRICYLQEIFSNEMAKVDDSFFHRLEESFLVEEDKKHERHPIFGNIVDEVAYHEKYPTIYHLRKKLVDSTDKADLRLIYLALAHMIKFRGHFLIEGDLNPDNSDVDKLFIQLVQTYNQLFEENPINASGVDAKAILSARLSKSRRLENLIAQLPGEKKNGLFGNLIALSLGLTPNFKSNFDLAEDAKLQLSKDTYDDDLDNLLAQIGDQYADLFLAAKNLSDAILLSDILRVNTEITKAPLSASMIKRYDEHHQDLTLLKALVRQQLPEKYKEIFFDQSKNGYAGYIDGGASQEEFYKFIKPILEKMDGTEELLVKLNREDLLRKQRTFDNGSIPHQIHLGELHAILRRQEDFYPFLKDNREKIEKILTFRIPYYVGPLARGNSRFAWMTRKSEETITPWNFEEVVDKGASAQSFIERMTNFDKNLPNEKVLPKHSLLYEYFTVYNELTKVKYVTEGMRKPAFLSGEQKKAIVDLLFKTNRKVTVKQLKEDYFKKIECFDSVEISGVEDRFNASLGTYHDLLKIIKDKDFLDNEENEDILEDIVLTLTLFEDREMIEERLKTYAHLFDDKVMKQLKRRRYTGWGRLSRKLINGIRDKQSGKTILDFLKSDGFANRNFMQLIHDDSLTFKEDIQKAQVSGQGDSLHEHIANLAGSPAIKKGILQTVKVVDELVKVMGRHKPENIVIEMARENQTTQKGQKNSRERMKRIEEGIKELGSQILKEHPVENTQLQNEKLYLYYLQNGRDMYVDQELDINRLSDYDVDHIVPQSFLKDDSIDNKVLTRSDKNRGKSDNVPSEEVVKKMKNYWRQLLNAKLITQRKFDNLTKAERGGLSELDKAGFIKRQLVETRQITKHVAQILDSRMNTKYDENDKLIREVKVITLKSKLVSDFRKDFQFYKVREINNYHHAHDAYLNAVVGTALIKKYPKLESEFVYGDYKVYDVRKMIAKSEQEIGKATAKYFFYSNIMNFFKTEITLANGEIRKRPLIETNGETGEIVWDKGRDFATVRKVLSMPQVNIVKKTEVQTGGFSKESILPKRNSDKLIARKKDWDPKKYGGFDSPTVAYSVLVVAKVEKGKSKKLKSVKELLGITIMERSSFEKNPIDFLEAKGYKEVKKDLIIKLPKYSLFELENGRKRMLASAGELQKGNELALPSKYVNFLYLASHYEKLKGSPEDNEQKQLFVEQHKHYLDEIIEQISEFSKRVILADANLDKVLSAYNKHRDKPIREQAENIIHLFTLTNLGAPAAFKYFDTTIDRKRYTSTKEVLDATLIHQSITGLYETRIDLSQLGGDSGGSGGSGGSTNLSDIIEKETGKQLVIQESILMLPEEVEEVIGNKPESDILVHTAYDESTDENVMLLTSDAPEYKPWALVIQDSNGENKIKMLSGGSGGSGGSTNLSDIIEKETGKQLVIQESILMLPEEVEEVIGNKPESDILVHTAYDESTDENVMLLTSDAPEYKPWALVIQDSNGENKIKMLSGGSKRTADGSEFEPKKKRKV

SEQ ID NO: 568 - protein, 1853 aa, synthetic construct
MKRTADGSEFESPKKKRKVSSETGPVAVDPTLRRRIEPHEFEVFFDPRELRKETCLLYEINWGGRHSIWRHTSQNTNKHVEVNFIEKFTTERYFCPNTRCSITWFLSWSPCGECSRAITEFLSRYPHVTLFIYIARLYHHADPRNRQGLRDLISSGVTIQIMTEQESGYCWRNFVNYSPSNEAHWPRYPHLWVRLYVLELYCIILGLPPCLNILRRKQPQLTFFTIALQSCHYQRLPPHILWATGLKSGGSSGGSSGSETPGTSESATPESSGGSSGGSDKKYSIGLAIGTNSVGWAVITDEYKVPSKKFKVLGNTDRHSIKKNLIGALLFDSGETAEATRLKRTARRRYTRRKNRICYLQEIFSNEMAKVDDSFFHRLEESFLVEEDKKHERHPIFGNIVDEVAYHEKYPTIYHLRKKLVDSTDKADLRLIYLALAHMIKFRGHFLIEGDLNPDNSDVDKLFIQLVQTYNQLFEENPINASGVDAKAILSARLSKSRRLENLIAQLPGEKKNGLFGNLIALSLGLTPNFKSNFDLAEDAKLQLSKDTYDDDLDNLLAQIGDQYADLFLAAKNLSDAILLSDILRVNTEITKAPLSASMIKRYDEHHQDLTLLKALVRQQLPEKYKEIFFDQSKNGYAGYIDGGASQEEFYKFIKPILEKMDGTEELLVKLNREDLLRKQRTFDNGSIPHQIHLGELHAILRRQEDFYPFLKDNREKIEKILTFRIPYYVGPLARGNSRFAWMTRKSEETITPWNFEEVVDKGASAQSFIERMTNFDKNLPNEKVLPKHSLLYEYFTVYNELTKVKYVTEGMRKPAFLSGEQKKAIVDLLFKTNRKVTVKQLKEDYFKKIECFDSVEISGVEDRFNASLGTYHDLLKIIKDKDFLDNEENEDILEDIVLTLTLFEDREMIEERLKTYAHLFDDKVMKQLKRRRYTGWGRLSRKLINGIRDKQSGKTILDFLKSDGFANRNFMQLIHDDSLTFKEDIQKAQVSGQGDSLHEHIANLAGSPAIKKGILQTVKVVDELVKVMGRHKPENIVIEMARENQTTQKGQKNSRERMKRIEEGIKELGSQILKEHPVENTQLQNEKLYLYYLQNGRDMYVDQELDINRLSDYDVDHIVPQSFLKDDSIDNKVLTRSDKNRGKSDNVPSEEVVKKMKNYWRQLLNAKLITQRKFDNLTKAERGGLSELDKAGFIKRQLVETRQITKHVAQILDSRMNTKYDENDKLIREVKVITLKSKLVSDFRKDFQFYKVREINNYHHAHDAYLNAVVGTALIKKYPKLESEFVYGDYKVYDVRKMIAKSEQEIGKATAKYFFYSNIMNFFKTEITLANGEIRKRPLIETNGETGEIVWDKGRDFATVRKVLSMPQVNIVKKTEVQTGGFSKESIRPKRNSDKLIARKKDWDPKKYGGFVSPTVAYSVLVVAKVEKGKSKKLKSVKELLGITIMERSSFEKNPIDFLEAKGYKEVKKDLIIKLPKYSLFELENGRKRMLASARFLQKGNELALPSKYVNFLYLASHYEKLKGSPEDNEQKQLFVEQHKHYLDEIIEQISEFSKRVILADANLDKVLSAYNKHRDKPIREQAENIIHLFTLTNLGAPRAFKYFDTTIDRKVYRSTKEVLDATLIHQSITGLYETRIDLSQLGGDSGGSGGSGGSTNLSDIIEKETGKQLVIQESILMLPEEVEEVIGNKPESDILVHTAYDESTDENVMLLTSDAPEYKPWALVIQDSNGENKIKMLSGGSGGSGGSTNLSDIIEKETGKQLVIQESILMLPEEVEEVIGNKPESDILVHTAYDESTDENVMLLTSDAPEYKPWALVIQDSNGENKIKMLSGGSKRTADGSEFEPKKKRKV

SEQ ID NO: 569 - protein, 1853 aa, synthetic construct
MKRTADGSEFESPKKKRKVSSETGPVAVDPTLRRRIEPHEFEVFFDPRELRKETCLLYEINWGGRHSIWRHTSQNTNKHVEVNFIEKFTTERYFCPNTRCSITWFLSYSPCGECSRAITEFLSRYPHVTLFIYIARLYHHADPENRQGLRDLISSGVTIQIMTEQESGYCWRNFVNYSPSNEAHWPRYPHLWVRLYVLELYCIILGLPPCLNILRRKQPQLTFFTIALQSCHYQRLPPHILWATGLKSGGSSGGSSGSETPGTSESATPESSGGSSGGSDKKYSIGLAIGTNSVGWAVITDEYKVPSKKFKVLGNTDRHSIKKNLIGALLFDSGETAEATRLKRTARRRYTRRKNRICYLQEIFSNEMAKVDDSFFHRLEESFLVEEDKKHERHPIFGNIVDEVAYHEKYPTIYHLRKKLVDSTDKADLRLIYLALAHMIKFRGHFLIEGDLNPDNSDVDKLFIQLVQTYNQLFEENPINASGVDAKAILSARLSKSRRLENLIAQLPGEKKNGLFGNLIALSLGLTPNFKSNFDLAEDAKLQLSKDTYDDDLDNLLAQIGDQYADLFLAAKNLSDAILLSDILRVNTEITKAPLSASMIKRYDEHHQDLTLLKALVRQQLPEKYKEIFFDQSKNGYAGYIDGGASQEEFYKFIKPILEKMDGTEELLVKLNREDLLRKQRTFDNGSIPHQIHLGELHAILRRQEDFYPFLKDNREKIEKILTFRIPYYVGPLARGNSRFAWMTRKSEETITPWNFEEVVDKGASAQSFIERMTNFDKNLPNEKVLPKHSLLYEYFTVYNELTKVKYVTEGMRKPAFLSGEQKKAIVDLLFKTNRKVTVKQLKEDYFKKIECFDSVEISGVEDRFNASLGTYHDLLKIIKDKDFLDNEENEDILEDIVLTLTLFEDREMIEERLKTYAHLFDDKVMKQLKRRRYTGWGRLSRKLINGIRDKQSGKTILDFLKSDGFANRNFMQLIHDDSLTFKEDIQKAQVSGQGDSLHEHIANLAGSPAIKKGILQTVKVVDELVKVMGRHKPENIVIEMARENQTTQKGQKNSRERMKRIEEGIKELGSQILKEHPVENTQLQNEKLYLYYLQNGRDMYVDQELDINRLSDYDVDHIVPQSFLKDDSIDNKVLTRSDKNRGKSDNVPSEEVVKKMKNYWRQLLNAKLITQRKFDNLTKAERGGLSELDKAGFIKRQLVETRQITKHVAQILDSRMNTKYDENDKLIREVKVITLKSKLVSDFRKDFQFYKVREINNYHHAHDAYLNAVVGTALIKKYPKLESEFVYGDYKVYDVRKMIAKSEQEIGKATAKYFFYSNIMNFFKTEITLANGEIRKRPLIETNGETGEIVWDKGRDFATVRKVLSMPQVNIVKKTEVQTGGFSKESIRPKRNSDKLIARKKDWDPKKYGGFVSPTVAYSVLVVAKVEKGKSKKLKSVKELLGITIMERSSFEKNPIDFLEAKGYKEVKKDLIIKLPKYSLFELENGRKRMLASARFLQKGNELALPSKYVNFLYLASHYEKLKGSPEDNEQKQLFVEQHKHYLDEIIEQISEFSKRVILADANLDKVLSAYNKHRDKPIREQAENIIHLFTLTNLGAPRAFKYFDTTIDRKVYRSTKEVLDATLIHQSITGLYETRIDLSQLGGDSGGSGGSGGSTNLSDIIEKETGKQLVIQESILMLPEEVEEVIGNKPESDILVHTAYDESTDENVMLLTSDAPEYKPWALVIQDSNGENKIKMLSGGSGGSGGSTNLSDIIEKETGKQLVIQESILMLPEEVEEVIGNKPESDILVHTAYDESTDENVMLLTSDAPEYKPWALVIQDSNGENKIKMLSGGSKRTADGSEFEPKKKRKV

SEQ ID NO: 570 - protein, 1853 aa, synthetic construct
MKRTADGSEFESPKKKRKVSSETGPVAVDPTLRRRIEPHEFEVFFDPRELRKETCLLYEINWGGRHSIWRHTSQNTNKHVEVNFIEKFTTERYFCPNTRCSITWFLSYSPCGECSRAITEFLSRYPHVTLFIYIARLYHHADPRNRQGLEDLISSGVTIQIMTEQESGYCWRNFVNYSPSNEAHWPRYPHLWVRLYVLELYCIILGLPPCLNILRRKQPQLTFFTIALQSCHYQRLPPHILWATGLKSGGSSGGSSGSETPGTSESATPESSGGSSGGSDKKYSIGLAIGTNSVGWAVITDEYKVPSKKFKVLGNTDRHSIKKNLIGALLFDSGETAEATRLKRTARRRYTRRKNRICYLQEIFSNEMAKVDDSFFHRLEESFLVEEDKKHERHPIFGNIVDEVAYHEKYPTIYHLRKKLVDSTDKADLRLIYLALAHMIKFRGHFLIEGDLNPDNSDVDKLFIQLVQTYNQLFEENPINASGVDAKAILSARLSKSRRLENLIAQLPGEKKNGLFGNLIALSLGLTPNFKSNFDLAEDAKLQLSKDTYDDDLDNLLAQIGDQYADLFLAAKNLSDAILLSDILRVNTEITKAPLSASMIKRYDEHHQDLTLLKALVRQQLPEKYKEIFFDQSKNGYAGYIDGGASQEEFYKFIKPILEKMDGTEELLVKLNREDLLRKQRTFDNGSIPHQIHLGELHAILRRQEDFYPFLKDNREKIEKILTFRIPYYVGPLARGNSRFAWMTRKSEETITPWNFEEVVDKGASAQSFIERMTNFDKNLPNEKVLPKHSLLYEYFTVYNELTKVKYVTEGMRKPAFLSGEQKKAIVDLLFKTNRKVTVKQLKEDYFKKIECFDSVEISGVEDRFNASLGTYHDLLKIIKDKDFLDNEENEDILEDIVLTLTLFEDREMIEERLKTYAHLFDDKVMKQLKRRRYTGWGRLSRKLINGIRDKQSGKTILDFLKSDGFANRNFMQLIHDDSLTFKEDIQKAQVSGQGDSLHEHIANLAGSPAIKKGILQTVKVVDELVKVMGRHKPENIVIEMARENQTTQKGQKNSRERMKRIEEGIKELGSQILKEHPVENTQLQNEKLYLYYLQNGRDMYVDQELDINRLSDYDVDHIVPQSFLKDDSIDNKVLTRSDKNRGKSDNVPSEEVVKKMKNYWRQLLNAKLITQRKFDNLTKAERGGLSELDKAGFIKRQLVETRQITKHVAQILDSRMNTKYDENDKLIREVKVITLKSKLVSDFRKDFQFYKVREINNYHHAHDAYLNAVVGTALIKKYPKLESEFVYGDYKVYDVRKMIAKSEQEIGKATAKYFFYSNIMNFFKTEITLANGEIRKRPLIETNGETGEIVWDKGRDFATVRKVLSMPQVNIVKKTEVQTGGFSKESIRPKRNSDKLIARKKDWDPKKYGGFVSPTVAYSVLVVAKVEKGKSKKLKSVKELLGITIMERSSFEKNPIDFLEAKGYKEVKKDLIIKLPKYSLFELENGRKRMLASARFLQKGNELALPSKYVNFLYLASHYEKLKGSPEDNEQKQLFVEQHKHYLDEIIEQISEFSKRVILADANLDKVLSAYNKHRDKPIREQAENIIHLFTLTNLGAPRAFKYFDTTIDRKVYRSTKEVLDATLIHQSITGLYETRIDLSQLGGDSGGSGGSGGSTNLSDIIEKETGKQLVIQESILMLPEEVEEVIGNKPESDILVHTAYDESTDENVMLLTSDAPEYKPWALVIQDSNGENKIKMLSGGSGGSGGSTNLSDIIEKETGKQLVIQESILMLPEEVEEVIGNKPESDILVHTAYDESTDENVMLLTSDAPEYKPWALVIQDSNGENKIKMLSGGSKRTADGSEFEPKKKRKV

SEQ ID NO: 571 - protein, 1853 aa, synthetic construct
MKRTADGSEFESPKKKRKVSSETGPVAVDPTLRRRIEPHEFEVFFDPRELRKETCLLYEINWGGRHSIWRHTSQNTNKHVEVNFIEKFTTERYFCPNTRCSITWFLSYSPCGECSRAITEFLSRYPHVTLFIYIARLYHHADPENRQGLEDLISSGVTIQIMTEQESGYCWRNFVNYSPSNEAHWPRYPHLWVRLYVLELYCIILGLPPCLNILRRKQPQLTFFTIALQSCHYQRLPPHILWATGLKSGGSSGGSSGSETPGTSESATPESSGGSSGGSDKKYSIGLAIGTNSVGWAVITDEYKVPSKKFKVLGNTDRHSIKKNLIGALLFDSGETAEATRLKRTARRRYTRRKNRICYLQEIFSNEMAKVDDSFFHRLEESFLVEEDKKHERHPIFGNIVDEVAYHEKYPTIYHLRKKLVDSTDKADLRLIYLALAHMIKFRGHFLIEGDLNPDNSDVDKLFIQLVQTYNQLFEENPINASGVDAKAILSARLSKSRRLENLIAQLPGEKKNGLFGNLIALSLGLTPNFKSNFDLAEDAKLQLSKDTYDDDLDNLLAQIGDQYADLFLAAKNLSDAILLSDILRVNTEITKAPLSASMIKRYDEHHQDLTLLKALVRQQLPEKYKEIFFDQSKNGYAGYIDGGASQEEFYKFIKPILEKMDGTEELLVKLNREDLLRKQRTFDNGSIPHQIHLGELHAILRRQEDFYPFLKDNREKIEKILTFRIPYYVGPLARGNSRFAWMTRKSEETITPWNFEEVVDKGASAQSFIERMTNFDKNLPNEKVLPKHSLLYEYFTVYNELTKVKYVTEGMRKPAFLSGEQKKAIVDLLFKTNRKVTVKQLKEDYFKKIECFDSVEISGVEDRFNASLGTYHDLLKIIKDKDFLDNEENEDILEDIVLTLTLFEDREMIEERLKTYAHLFDDKVMKQLKRRRYTGWGRLSRKLINGIRDKQSGKTILDFLKSDGFANRNFMQLIHDDSLTFKEDIQKAQVSGQGDSLHEHIANLAGSPAIKKGILQTVKVVDELVKVMGRHKPENIVIEMARENQTTQKGQKNSRERMKRIEEGIKELGSQILKEHPVENTQLQNEKLYLYYLQNGRDMYVDQELDINRLSDYDVDHIVPQSFLKDDSIDNKVLTRSDKNRGKSDNVPSEEVVKKMKNYWRQLLNAKLITQRKFDNLTKAERGGLSELDKAGFIKRQLVETRQITKHVAQILDSRMNTKYDENDKLIREVKVITLKSKLVSDFRKDFQFYKVREINNYHHAHDAYLNAVVGTALIKKYPKLESEFVYGDYKVYDVRKMIAKSEQEIGKATAKYFFYSNIMNFFKTEITLANGEIRKRPLIETNGETGEIVWDKGRDFATVRKVLSMPQVNIVKKTEVQTGGFSKESIRPKRNSDKLIARKKDWDPKKYGGFVSPTVAYSVLVVAKVEKGKSKKLKSVKELLGITIMERSSFEKNPIDFLEAKGYKEVKKDLIIKLPKYSLFELENGRKRMLASARFLQKGNELALPSKYVNFLYLASHYEKLKGSPEDNEQKQLFVEQHKHYLDEIIEQISEFSKRVILADANLDKVLSAYNKHRDKPIREQAENIIHLFTLTNLGAPRAFKYFDTTIDRKVYRSTKEVLDATLIHQSITGLYETRIDLSQLGGDSGGSGGSGGSTNLSDIIEKETGKQLVIQESILMLPEEVEEVIGNKPESDILVHTAYDESTDENVMLLTSDAPEYKPWALVIQDSNGENKIKMLSGGSGGSGGSTNLSDIIEKETGKQLVIQESILMLPEEVEEVIGNKPESDILVHTAYDESTDENVMLLTSDAPEYKPWALVIQDSNGENKIKMLSGGSKRTADGSEFEPKKKRKV

SEQ ID NO: 572 - protein, 1853 aa, synthetic construct
MKRTADGSEFESPKKKRKVSSETGPVAVDPTLRRRIEPHEFEVFFDPRELRKETCLLYEINWGGRHSIWRHTSQNTNKHVEVNFIEKFTTERYFCPNTRCSITWFLSWSPCGECSRAITEFLSRYPHVTLFIYIARLYHHADPENRQGLEDLISSGVTIQIMTEQESGYCWRNFVNYSPSNEAHWPRYPHLWVRLYVLELYCIILGLPPCLNILRRKQPQLTFFTIALQSCHYQRLPPHILWATGLKSGGSSGGSSGSETPGTSESATPESSGGSSGGSDKKYSIGLAIGTNSVGWAVITDEYKVPSKKFKVLGNTDRHSIKKNLIGALLFDSGETAEATRLKRTARRRYTRRKNRICYLQEIFSNEMAKVDDSFFHRLEESFLVEEDKKHERHPIFGNIVDEVAYHEKYPTIYHLRKKLVDSTDKADLRLIYLALAHMIKFRGHFLIEGDLNPDNSDVDKLFIQLVQTYNQLFEENPINASGVDAKAILSARLSKSRRLENLIAQLPGEKKNGLFGNLIALSLGLTPNFKSNFDLAEDAKLQLSKDTYDDDLDNLLAQIGDQYADLFLAAKNLSDAILLSDILRVNTEITKAPLSASMIKRYDEHHQDLTLLKALVRQQLPEKYKEIFFDQSKNGYAGYIDGGASQEEFYKFIKPILEKMDGTEELLVKLNREDLLRKQRTFDNGSIPHQIHLGELHAILRRQEDFYPFLKDNREKIEKILTFRIPYYVGPLARGNSRFAWMTRKSEETITPWNFEEVVDKGASAQSFIERMTNFDKNLPNEKVLPKHSLLYEYFTVYNELTKVKYVTEGMRKPAFLSGEQKKAIVDLLFKTNRKVTVKQLKEDYFKKIECFDSVEISGVEDRFNASLGTYHDLLKIIKDKDFLDNEENEDILEDIVLTLTLFEDREMIEERLKTYAHLFDDKVMKQLKRRRYTGWGRLSRKLINGIRDKQSGKTILDFLKSDGFANRNFMQLIHDDSLTFKEDIQKAQVSGQGDSLHEHIANLAGSPAIKKGILQTVKVVDELVKVMGRHKPENIVIEMARENQTTQKGQKNSRERMKRIEEGIKELGSQILKEHPVENTQLQNEKLYLYYLQNGRDMYVDQELDINRLSDYDVDHIVPQSFLKDDSIDNKVLTRSDKNRGKSDNVPSEEVVKKMKNYWRQLLNAKLITQRKFDNLTKAERGGLSELDKAGFIKRQLVETRQITKHVAQILDSRMNTKYDENDKLIREVKVITLKSKLVSDFRKDFQFYKVREINNYHHAHDAYLNAVVGTALIKKYPKLESEFVYGDYKVYDVRKMIAKSEQEIGKATAKYFFYSNIMNFFKTEITLANGEIRKRPLIETNGETGEIVWDKGRDFATVRKVLSMPQVNIVKKTEVQTGGFSKESIRPKRNSDKLIARKKDWDPKKYGGFVSPTVAYSVLVVAKVEKGKSKKLKSVKELLGITIMERSSFEKNPIDFLEAKGYKEVKKDLIIKLPKYSLFELENGRKRMLASARFLQKGNELALPSKYVNFLYLASHYEKLKGSPEDNEQKQLFVEQHKHYLDEIIEQISEFSKRVILADANLDKVLSAYNKHRDKPIREQAENIIHLFTLTNLGAPRAFKYFDTTIDRKVYRSTKEVLDATLIHQSITGLYETRIDLSQLGGDSGGSGGSGGSTNLSDIIEKETGKQLVIQESILMLPEEVEEVIGNKPESDILVHTAYDESTDENVMLLTSDAPEYKPWALVIQDSNGENKIKMLSGGSGGSGGSTNLSDIIEKETGKQLVIQESILMLPEEVEEVIGNKPESDILVHTAYDESTDENVMLLTSDAPEYKPWALVIQDSNGENKIKMLSGGSKRTADGSEFEPKKKRKV

SEQ ID NO: 573 - protein, 1853 aa, synthetic construct
MKRTADGSEFESPKKKRKVSSETGPVAVDPTLRRRIEPHEFEVFFDPRELAAETCLLYEINWGGRHSIWRHTSQNTNKHVEVNFIEKFTTERYFCPNTRCSITWFLSWSPCGECSRAITEFLSRYPHVTLFIYIARLYHHADPRNRQGLRDLISSGVTIQIMTEQESGYCWRNFVNYSPSNEAHWPRYPHLWVRLYVLELYCIILGLPPCLNILRRKQPQLTFFTIALQSCHYQRLPPHILWATGLKSGGSSGGSSGSETPGTSESATPESSGGSSGGSDKKYSIGLAIGTNSVGWAVITDEYKVPSKKFKVLGNTDRHSIKKNLIGALLFDSGETAEATRLKRTARRRYTRRKNRICYLQEIFSNEMAKVDDSFFHRLEESFLVEEDKKHERHPIFGNIVDEVAYHEKYPTIYHLRKKLVDSTDKADLRLIYLALAHMIKFRGHFLIEGDLNPDNSDVDKLFIQLVQTYNQLFEENPINASGVDAKAILSARLSKSRRLENLIAQLPGEKKNGLFGNLIALSLGLTPNFKSNFDLAEDAKLQLSKDTYDDDLDNLLAQIGDQYADLFLAAKNLSDAILLSDILRVNTEITKAPLSASMIKRYDEHHQDLTLLKALVRQQLPEKYKEIFFDQSKNGYAGYIDGGASQEEFYKFIKPILEKMDGTEELLVKLNREDLLRKQRTFDNGSIPHQIHLGELHAILRRQEDFYPFLKDNREKIEKILTFRIPYYVGPLARGNSRFAWMTRKSEETITPWNFEEVVDKGASAQSFIERMTNFDKNLPNEKVLPKHSLLYEYFTVYNELTKVKYVTEGMRKPAFLSGEQKKAIVDLLFKTNRKVTVKQLKEDYFKKIECFDSVEISGVEDRFNASLGTYHDLLKIIKDKDFLDNEENEDILEDIVLTLTLFEDREMIEERLKTYAHLFDDKVMKQLKRRRYTGWGRLSRKLINGIRDKQSGKTILDFLKSDGFANRNFMQLIHDDSLTFKEDIQKAQVSGQGDSLHEHIANLAGSPAIKKGILQTVKVVDELVKVMGRHKPENIVIEMARENQTTQKGQKNSRERMKRIEEGIKELGSQILKEHPVENTQLQNEKLYLYYLQNGRDMYVDQELDINRLSDYDVDHIVPQSFLKDDSIDNKVLTRSDKNRGKSDNVPSEEVVKKMKNYWRQLLNAKLITQRKFDNLTKAERGGLSELDKAGFIKRQLVETRQITKHVAQILDSRMNTKYDENDKLIREVKVITLKSKLVSDFRKDFQFYKVREINNYHHAHDAYLNAVVGTALIKKYPKLESEFVYGDYKVYDVRKMIAKSEQEIGKATAKYFFYSNIMNFFKTEITLANGEIRKRPLIETNGETGEIVWDKGRDFATVRKVLSMPQVNIVKKTEVQTGGFSKESIRPKRNSDKLIARKKDWDPKKYGGFVSPTVAYSVLVVAKVEKGKSKKLKSVKELLGITIMERSSFEKNPIDFLEAKGYKEVKKDLIIKLPKYSLFELENGRKRMLASARFLQKGNELALPSKYVNFLYLASHYEKLKGSPEDNEQKQLFVEQHKHYLDEIIEQISEFSKRVILADANLDKVLSAYNKHRDKPIREQAENIIHLFTLTNLGAPRAFKYFDTTIDRKVYRSTKEVLDATLIHQSITGLYETRIDLSQLGGDSGGSGGSGGSTNLSDIIEKETGKQLVIQESILMLPEEVEEVIGNKPESDILVHTAYDESTDENVMLLTSDAPEYKPWALVIQDSNGENKIKMLSGGSGGSGGSTNLSDIIEKETGKQLVIQESILMLPEEVEEVIGNKPESDILVHTAYDESTDENVMLLTSDAPEYKPWALVIQDSNGENKIKMLSGGSKRTADGSEFEPKKKRKV

SEQ ID NO: 574 - protein, 1874 aa, synthetic construct
MKRTADGSEFESPKKKRKVSSETGPVAVDPTLRRRIEPHEFEVFFDPRELRKETCLLYEINWGGRHSIWRHTSQNTNKHVEVNFIEKFTTERYFCPNTRCSITWFLSYSPCGECSRAITEFLSRYPHVTLFIYIARLYHHADPENRQGLRDLISSGVTIQIMTEQESGYCWRNFVNYSPSNEAHWPRYPHLWVRLYVLELYCIILGLPPCLNILRRKQPQLTFFTIALQSCHYQRLPPHILWATGLKSGGSSGGSSGSETPGTSESATPESSGGSSGGSEIGKATAKYFFYSNIMNFFKTEITLANGEIRKRPLIETNGETGEIVWDKGRDFATVRKVLSMPQVNIVKKTEVQTGGFSKESILPKRNSDKLIARKKDWDPKKYGGFDSPTVAYSVLVVAKVEKGKSKKLKSVKELLGITIMERSSFEKNPIDFLEAKGYKEVKKDLIIKLPKYSLFELENGRKRMLASAGELQKGNELALPSKYVNFLYLASHYEKLKGSPEDNEQKQLFVEQHKHYLDEIIEQISEFSKRVILADANLDKVLSAYNKHRDKPIREQAENIIHLFTLTNLGAPAAFKYFDTTIDRKRYTSTKEVLDATLIHQSITGLYETRIDLSQLGGDGGSGGSGGSGGSGGSGGSGGMDKKYSIGLAIGTNSVGWAVITDEYKVPSKKFKVLGNTDRHSIKKNLIGALLFDSGETAEATRLKRTARRRYTRRKNRICYLQEIFSNEMAKVDDSFFHRLEESFLVEEDKKHERHPIFGNIVDEVAYHEKYPTIYHLRKKLVDSTDKADLRLIYLALAHMIKFRGHFLIEGDLNPDNSDVDKLFIQLVQTYNQLFEENPINASGVDAKAILSARLSKSRRLENLIAQLPGEKKNGLFGNLIALSLGLTPNFKSNFDLAEDAKLQLSKDTYDDDLDNLLAQIGDQYADLFLAAKNLSDAILLSDILRVNTEITKAPLSASMIKRYDEHHQDLTLLKALVRQQLPEKYKEIFFDQSKNGYAGYIDGGASQEEFYKFIKPILEKMDGTEELLVKLNREDLLRKQRTFDNGSIPHQIHLGELHAILRRQEDFYPFLKDNREKIEKILTFRIPYYVGPLARGNSRFAWMTRKSEETITPWNFEEVVDKGASAQSFIERMTNFDKNLPNEKVLPKHSLLYEYFTVYNELTKVKYVTEGMRKPAFLSGEQKKAIVDLLFKTNRKVTVKQLKEDYFKKIECFDSVEISGVEDRFNASLGTYHDLLKIIKDKDFLDNEENEDILEDIVLTLTLFEDREMIEERLKTYAHLFDDKVMKQLKRRRYTGWGRLSRKLINGIRDKQSGKTILDFLKSDGFANRNFMQLIHDDSLTFKEDIQKAQVSGQGDSLHEHIANLAGSPAIKKGILQTVKVVDELVKVMGRHKPENIVIEMARENQTTQKGQKNSRERMKRIEEGIKELGSQILKEHPVENTQLQNEKLYLYYLQNGRDMYVDQELDINRLSDYDVDHIVPQSFLKDDSIDNKVLTRSDKNRGKSDNVPSEEVVKKMKNYWRQLLNAKLITQRKFDNLTKAERGGLSELDKAGFIKRQLVETRQITKHVAQILDSRMNTKYDENDKLIREVKVITLKSKLVSDFRKDFQFYKVREINNYHHAHDAYLNAVVGTALIKKYPKLESEFVYGDYKVYDVRKMIAKSEQSGGSGGSGGSTNLSDIIEKETGKQLVIQESILMLPEEVEEVIGNKPESDILVHTAYDESTDENVMLLTSDAPEYKPWALVIQDSNGENKIKMLSGGSGGSGGSTNLSDIIEKETGKQLVIQESILMLPEEVEEVIGNKPESDILVHTAYDESTDENVMLLTSDAPEYKPWALVIQDSNGENKIKMLSGGSKRTADGSEFEPKKKRKV

SEQ ID NO: 575 - protein, 1874 aa, synthetic construct
MKRTADGSEFESPKKKRKVSSETGPVAVDPTLRRRIEPHEFEVFFDPRELRKETCLLYEINWGGRHSIWRHTSQNTNKHVEVNFIEKFTTERYFCPNTRCSITWFLSYSPCGECSRAITEFLSRYPHVTLFIYIARLYHHADPRNRQGLEDLISSGVTIQIMTEQESGYCWRNFVNYSPSNEAHWPRYPHLWVRLYVLELYCIILGLPPCLNILRRKQPQLTFFTIALQSCHYQRLPPHILWATGLKSGGSSGGSSGSETPGTSESATPESSGGSSGGSEIGKATAKYFFYSNIMNFFKTEITLANGEIRKRPLIETNGETGEIVWDKGRDFATVRKVLSMPQVNIVKKTEVQTGGFSKESILPKRNSDKLIARKKDWDPKKYGGFDSPTVAYSVLVVAKVEKGKSKKLKSVKELLGITIMERSSFEKNPIDFLEAKGYKEVKKDLIIKLPKYSLFELENGRKRMLASAGELQKGNELALPSKYVNFLYLASHYEKLKGSPEDNEQKQLFVEQHKHYLDEIIEQISEFSKRVILADANLDKVLSAYNKHRDKPIREQAENIIHLFTLTNLGAPAAFKYFDTTIDRKRYTSTKEVLDATLIHQSITGLYETRIDLSQLGGDGGSGGSGGSGGSGGSGGSGGMDKKYSIGLAIGTNSVGWAVITDEYKVPSKKFKVLGNTDRHSIKKNLIGALLFDSGETAEATRLKRTARRRYTRRKNRICYLQEIFSNEMAKVDDSFFHRLEESFLVEEDKKHERHPIFGNIVDEVAYHEKYPTIYHLRKKLVDSTDKADLRLIYLALAHMIKFRGHFLIEGDLNPDNSDVDKLFIQLVQTYNQLFEENPINASGVDAKAILSARLSKSRRLENLIAQLPGEKKNGLFGNLIALSLGLTPNFKSNFDLAEDAKLQLSKDTYDDDLDNLLAQIGDQYADLFLAAKNLSDAILLSDILRVNTEITKAPLSASMIKRYDEHHQDLTLLKALVRQQLPEKYKEIFFDQSKNGYAGYIDGGASQEEFYKFIKPILEKMDGTEELLVKLNREDLLRKQRTFDNGSIPHQIHLGELHAILRRQEDFYPFLKDNREKIEKILTFRIPYYVGPLARGNSRFAWMTRKSEETITPWNFEEVVDKGASAQSFIERMTNFDKNLPNEKVLPKHSLLYEYFTVYNELTKVKYVTEGMRKPAFLSGEQKKAIVDLLFKTNRKVTVKQLKEDYFKKIECFDSVEISGVEDRFNASLGTYHDLLKIIKDKDFLDNEENEDILEDIVLTLTLFEDREMIEERLKTYAHLFDDKVMKQLKRRRYTGWGRLSRKLINGIRDKQSGKTILDFLKSDGFANRNFMQLIHDDSLTFKEDIQKAQVSGQGDSLHEHIANLAGSPAIKKGILQTVKVVDELVKVMGRHKPENIVIEMARENQTTQKGQKNSRERMKRIEEGIKELGSQILKEHPVENTQLQNEKLYLYYLQNGRDMYVDQELDINRLSDYDVDHIVPQSFLKDDSIDNKVLTRSDKNRGKSDNVPSEEVVKKMKNYWRQLLNAKLITQRKFDNLTKAERGGLSELDKAGFIKRQLVETRQITKHVAQILDSRMNTKYDENDKLIREVKVITLKSKLVSDFRKDFQFYKVREINNYHHAHDAYLNAVVGTALIKKYPKLESEFVYGDYKVYDVRKMIAKSEQSGGSGGSGGSTNLSDIIEKETGKQLVIQESILMLPEEVEEVIGNKPESDILVHTAYDESTDENVMLLTSDAPEYKPWALVIQDSNGENKIKMLSGGSGGSGGSTNLSDIIEKETGKQLVIQESILMLPEEVEEVIGNKPESDILVHTAYDESTDENVMLLTSDAPEYKPWALVIQDSNGENKIKMLSGGSKRTADGSEFEPKKKRKV

SEQ ID NO: 576 - protein, 1874 aa, synthetic construct
MKRTADGSEFESPKKKRKVSSETGPVAVDPTLRRRIEPHEFEVFFDPRELRKETCLLYEINWGGRHSIWRHTSQNTNKHVEVNFIEKFTTERYFCPNTRCSITWFLSYSPCGECSRAITEFLSRYPHVTLFIYIARLYHHADPENRQGLEDLISSGVTIQIMTEQESGYCWRNFVNYSPSNEAHWPRYPHLWVRLYVLELYCIILGLPPCLNILRRKQPQLTFFTIALQSCHYQRLPPHILWATGLKSGGSSGGSSGSETPGTSESATPESSGGSSGGSEIGKATAKYFFYSNIMNFFKTEITLANGEIRKRPLIETNGETGEIVWDKGRDFATVRKVLSMPQVNIVKKTEVQTGGFSKESILPKRNSDKLIARKKDWDPKKYGGFDSPTVAYSVLVVAKVEKGKSKKLKSVKELLGITIMERSSFEKNPIDFLEAKGYKEVKKDLIIKLPKYSLFELENGRKRMLASAGELQKGNELALPSKYVNFLYLASHYEKLKGSPEDNEQKQLFVEQHKHYLDEIIEQISEFSKRVILADANLDKVLSAYNKHRDKPIREQAENIIHLFTLTNLGAPAAFKYFDTTIDRKRYTSTKEVLDATLIHQSITGLYETRIDLSQLGGDGGSGGSGGSGGSGGSGGSGGMDKKYSIGLAIGTNSVGWAVITDEYKVPSKKFKVLGNTDRHSIKKNLIGALLFDSGETAEATRLKRTARRRYTRRKNRICYLQEIFSNEMAKVDDSFFHRLEESFLVEEDKKHERHPIFGNIVDEVAYHEKYPTIYHLRKKLVDSTDKADLRLIYLALAHMIKFRGHFLIEGDLNPDNSDVDKLFIQLVQTYNQLFEENPINASGVDAKAILSARLSKSRRLENLIAQLPGEKKNGLFGNLIALSLGLTPNFKSNFDLAEDAKLQLSKDTYDDDLDNLLAQIGDQYADLFLAAKNLSDAILLSDILRVNTEITKAPLSASMIKRYDEHHQDLTLLKALVRQQLPEKYKEIFFDQSKNGYAGYIDGGASQEEFYKFIKPILEKMDGTEELLVKLNREDLLRKQRTFDNGSIPHQIHLGELHAILRRQEDFYPFLKDNREKIEKILTFRIPYYVGPLARGNSRFAWMTRKSEETITPWNFEEVVDKGASAQSFIERMTNFDKNLPNEKVLPKHSLLYEYFTVYNELTKVKYVTEGMRKPAFLSGEQKKAIVDLLFKTNRKVTVKQLKEDYFKKIECFDSVEISGVEDRFNASLGTYHDLLKIIKDKDFLDNEENEDILEDIVLTLTLFEDREMIEERLKTYAHLFDDKVMKQLKRRRYTGWGRLSRKLINGIRDKQSGKTILDFLKSDGFANRNFMQLIHDDSLTFKEDIQKAQVSGQGDSLHEHIANLAGSPAIKKGILQTVKVVDELVKVMGRHKPENIVIEMARENQTTQKGQKNSRERMKRIEEGIKELGSQILKEHPVENTQLQNEKLYLYYLQNGRDMYVDQELDINRLSDYDVDHIVPQSFLKDDSIDNKVLTRSDKNRGKSDNVPSEEVVKKMKNYWRQLLNAKLITQRKFDNLTKAERGGLSELDKAGFIKRQLVETRQITKHVAQILDSRMNTKYDENDKLIREVKVITLKSKLVSDFRKDFQFYKVREINNYHHAHDAYLNAVVGTALIKKYPKLESEFVYGDYKVYDVRKMIAKSEQSGGSGGSGGSTNLSDIIEKETGKQLVIQESILMLPEEVEEVIGNKPESDILVHTAYDESTDENVMLLTSDAPEYKPWALVIQDSNGENKIKMLSGGSGGSGGSTNLSDIIEKETGKQLVIQESILMLPEEVEEVIGNKPESDILVHTAYDESTDENVMLLTSDAPEYKPWALVIQDSNGENKIKMLSGGSKRTADGSEFEPKKKRKV

SEQ ID NO: 577 - protein, 1874 aa, synthetic construct
MKRTADGSEFESPKKKRKVSSETGPVAVDPTLRRRIEPHEFEVFFDPRELRKETCLLYEINWGGRHSIWRHTSQNTNKHVEVNFIEKFTTERYFCPNTRCSITWFLSWSPCGECSRAITEFLSRYPHVTLFIYIARLYHHADPENRQGLEDLISSGVTIQIMTEQESGYCWRNFVNYSPSNEAHWPRYPHLWVRLYVLELYCIILGLPPCLNILRRKQPQLTFFTIALQSCHYQRLPPHILWATGLKSGGSSGGSSGSETPGTSESATPESSGGSSGGSEIGKATAKYFFYSNIMNFFKTEITLANGEIRKRPLIETNGETGEIVWDKGRDFATVRKVLSMPQVNIVKKTEVQTGGFSKESILPKRNSDKLIARKKDWDPKKYGGFDSPTVAYSVLVVAKVEKGKSKKLKSVKELLGITIMERSSFEKNPIDFLEAKGYKEVKKDLIIKLPKYSLFELENGRKRMLASAGELQKGNELALPSKYVNFLYLASHYEKLKGSPEDNEQKQLFVEQHKHYLDEIIEQISEFSKRVILADANLDKVLSAYNKHRDKPIREQAENIIHLFTLTNLGAPAAFKYFDTTIDRKRYTSTKEVLDATLIHQSITGLYETRIDLSQLGGDGGSGGSGGSGGSGGSGGSGGMDKKYSIGLAIGTNSVGWAVITDEYKVPSKKFKVLGNTDRHSIKKNLIGALLFDSGETAEATRLKRTARRRYTRRKNRICYLQEIFSNEMAKVDDSFFHRLEESFLVEEDKKHERHPIFGNIVDEVAYHEKYPTIYHLRKKLVDSTDKADLRLIYLALAHMIKFRGHFLIEGDLNPDNSDVDKLFIQLVQTYNQLFEENPINASGVDAKAILSARLSKSRRLENLIAQLPGEKKNGLFGNLIALSLGLTPNFKSNFDLAEDAKLQLSKDTYDDDLDNLLAQIGDQYADLFLAAKNLSDAILLSDILRVNTEITKAPLSASMIKRYDEHHQDLTLLKALVRQQLPEKYKEIFFDQSKNGYAGYIDGGASQEEFYKFIKPILEKMDGTEELLVKLNREDLLRKQRTFDNGSIPHQIHLGELHAILRRQEDFYPFLKDNREKIEKILTFRIPYYVGPLARGNSRFAWMTRKSEETITPWNFEEVVDKGASAQSFIERMTNFDKNLPNEKVLPKHSLLYEYFTVYNELTKVKYVTEGMRKPAFLSGEQKKAIVDLLFKTNRKVTVKQLKEDYFKKIECFDSVEISGVEDRFNASLGTYHDLLKIIKDKDFLDNEENEDILEDIVLTLTLFEDREMIEERLKTYAHLFDDKVMKQLKRRRYTGWGRLSRKLINGIRDKQSGKTILDFLKSDGFANRNFMQLIHDDSLTFKEDIQKAQVSGQGDSLHEHIANLAGSPAIKKGILQTVKVVDELVKVMGRHKPENIVIEMARENQTTQKGQKNSRERMKRIEEGIKELGSQILKEHPVENTQLQNEKLYLYYLQNGRDMYVDQELDINRLSDYDVDHIVPQSFLKDDSIDNKVLTRSDKNRGKSDNVPSEEVVKKMKNYWRQLLNAKLITQRKFDNLTKAERGGLSELDKAGFIKRQLVETRQITKHVAQILDSRMNTKYDENDKLIREVKVITLKSKLVSDFRKDFQFYKVREINNYHHAHDAYLNAVVGTALIKKYPKLESEFVYGDYKVYDVRKMIAKSEQSGGSGGSGGSTNLSDIIEKETGKQLVIQESILMLPEEVEEVIGNKPESDILVHTAYDESTDENVMLLTSDAPEYKPWALVIQDSNGENKIKMLSGGSGGSGGSTNLSDIIEKETGKQLVIQESILMLPEEVEEVIGNKPESDILVHTAYDESTDENVMLLTSDAPEYKPWALVIQDSNGENKIKMLSGGSKRTADGSEFEPKKKRKV

SEQ ID NO: 578 - protein, 1874 aa, synthetic construct
MKRTADGSEFESPKKKRKVSSETGPVAVDPTLRRRIEPHEFEVFFDPRELAAETCLLYEINWGGRHSIWRHTSQNTNKHVEVNFIEKFTTERYFCPNTRCSITWFLSWSPCGECSRAITEFLSRYPHVTLFIYIARLYHHADPRNRQGLRDLISSGVTIQIMTEQESGYCWRNFVNYSPSNEAHWPRYPHLWVRLYVLELYCIILGLPPCLNILRRKQPQLTFFTIALQSCHYQRLPPHILWATGLKSGGSSGGSSGSETPGTSESATPESSGGSSGGSEIGKATAKYFFYSNIMNFFKTEITLANGEIRKRPLIETNGETGEIVWDKGRDFATVRKVLSMPQVNIVKKTEVQTGGFSKESILPKRNSDKLIARKKDWDPKKYGGFDSPTVAYSVLVVAKVEKGKSKKLKSVKELLGITIMERSSFEKNPIDFLEAKGYKEVKKDLIIKLPKYSLFELENGRKRMLASAGELQKGNELALPSKYVNFLYLASHYEKLKGSPEDNEQKQLFVEQHKHYLDEIIEQISEFSKRVILADANLDKVLSAYNKHRDKPIREQAENIIHLFTLTNLGAPAAFKYFDTTIDRKRYTSTKEVLDATLIHQSITGLYETRIDLSQLGGDGGSGGSGGSGGSGGSGGSGGMDKKYSIGLAIGTNSVGWAVITDEYKVPSKKFKVLGNTDRHSIKKNLIGALLFDSGETAEATRLKRTARRRYTRRKNRICYLQEIFSNEMAKVDDSFFHRLEESFLVEEDKKHERHPIFGNIVDEVAYHEKYPTIYHLRKKLVDSTDKADLRLIYLALAHMIKFRGHFLIEGDLNPDNSDVDKLFIQLVQTYNQLFEENPINASGVDAKAILSARLSKSRRLENLIAQLPGEKKNGLFGNLIALSLGLTPNFKSNFDLAEDAKLQLSKDTYDDDLDNLLAQIGDQYADLFLAAKNLSDAILLSDILRVNTEITKAPLSASMIKRYDEHHQDLTLLKALVRQQLPEKYKEIFFDQSKNGYAGYIDGGASQEEFYKFIKPILEKMDGTEELLVKLNREDLLRKQRTFDNGSIPHQIHLGELHAILRRQEDFYPFLKDNREKIEKILTFRIPYYVGPLARGNSRFAWMTRKSEETITPWNFEEVVDKGASAQSFIERMTNFDKNLPNEKVLPKHSLLYEYFTVYNELTKVKYVTEGMRKPAFLSGEQKKAIVDLLFKTNRKVTVKQLKEDYFKKIECFDSVEISGVEDRFNASLGTYHDLLKIIKDKDFLDNEENEDILEDIVLTLTLFEDREMIEERLKTYAHLFDDKVMKQLKRRRYTGWGRLSRKLINGIRDKQSGKTILDFLKSDGFANRNFMQLIHDDSLTFKEDIQKAQVSGQGDSLHEHIANLAGSPAIKKGILQTVKVVDELVKVMGRHKPENIVIEMARENQTTQKGQKNSRERMKRIEEGIKELGSQILKEHPVENTQLQNEKLYLYYLQNGRDMYVDQELDINRLSDYDVDHIVPQSFLKDDSIDNKVLTRSDKNRGKSDNVPSEEVVKKMKNYWRQLLNAKLITQRKFDNLTKAERGGLSELDKAGFIKRQLVETRQITKHVAQILDSRMNTKYDENDKLIREVKVITLKSKLVSDFRKDFQFYKVREINNYHHAHDAYLNAVVGTALIKKYPKLESEFVYGDYKVYDVRKMIAKSEQSGGSGGSGGSTNLSDIIEKETGKQLVIQESILMLPEEVEEVIGNKPESDILVHTAYDESTDENVMLLTSDAPEYKPWALVIQDSNGENKIKMLSGGSGGSGGSTNLSDIIEKETGKQLVIQESILMLPEEVEEVIGNKPESDILVHTAYDESTDENVMLLTSDAPEYKPWALVIQDSNGENKIKMLSGGSKRTADGSEFEPKKKRKV

SEQ ID NO: 579 - protein, 229 aa, Rattus sp. [sequence omitted]

SEQ ID NO: 580 - protein, 236 aa, Homo sapiens; identical to SEQ ID NO: 48

SEQ ID NO: 581 - protein, 200 aa, Homo sapiens
MSEASPASGPRHLMDPHIFTSNFNNGIGRHKTYLCYEVERLDNGTSVKMDQHRGFLHNQAKNLLCGFYGRHAELRFLDLVPSLQLDPAQIYRVTWFISWSPCFSWGCAGEVRAFLQENTHVRLRIFAARIYDYDPLYKEALQMLRDAGAQVSIMTYDEFKHCWDTFVDHQGCPFQPWDGLDEHSQALSGRLRAILQNQGN

SEQ ID NO: 582 - protein, 382 aa, Homo sapiens; identical to SEQ ID NO: 37

SEQ ID NO: 583 - protein, 384 aa, Homo sapiens; identical to SEQ ID NO: 36

SEQ ID NO: 584 - protein, 199 aa, synthetic construct
MEASPASGPRHLMDPHIFTSNFNNGIGRHKTYLCYEVERLDNGTSVKMDQHRGFLHGQAKNLLCGFYGRHAELRFLDLVPSLQLDPAQIYRVTWFISWSPCFSWGCAGEVRAFLQENTHVRLRIFAARIYDYDPLYKEALQMLRDAGAQVSIMTYDEFKHCWDTFVDHQGCPFQPWDGLDEHSQALSGRLRAILQNQGN

SEQ ID NO: 585 - protein, 208 aa, synthetic construct
MTDAEYVRIHEKLDIYTFKKQFSNNKKSVSHRCYVLFELKRRGERRACFWGYAVNKPQSGTERGIHAEIFSIRKVEEYLRDNPGQFTINWYSSWSPCADCAEKILEWYNQELRGNGHTLKIWVCKLYYEKNARNQIGLWNLRDNGVGLNVMVSEHYQCCRKIFIQSSHNQLNENRWLEKTLKRAEKRRSELSIMFQVKILHTTKSPAV

SEQ ID NO: 586 - protein, 229 aa, synthetic construct
MSSKTGPVAVDPTLRRRIEPHEFEVFFDPRELRKETCLLYEINWGGRHSIWRHTSQNTNKHVEVNFIEKFTTERYFCPNTRCSITWFLSWSPCGECSRAITEFLSRYPNVTLFIYIARLYHLANPRNRQGLRDLISSGVTIQIMTEQESGYCWHNFVNYSPSNESHWPRYPHLWVRLYVLELYCIILGLPPCLNILRRKQSQLTSFTIALQSCHYQRLPPHILWATGLK

SEQ ID NO: 587 - protein, 229 aa, synthetic construct
MSSETGPVAVDPTLRRRIEPHEFEVFFDPRELRKETCLLYEINWGGRHSIWRHTSQNTNKHVEVNFIEKFTTERYFCPNTRCSITWFLSYSPCGECSRAITEFLSRYPHVTLFIYIARLYHHADPENRQGLRDLISSGVTIQIMTEQESGYCWRNFVNYSPSNEAHWPRYPHLWVRLYVLELYCIILGLPPCLNILRRKQPQLTFFTIALQSCHYQRLPPHILWATGLK

SEQ ID NO: 588 - protein, 229 aa, synthetic construct
MSSETGPVAVDPTLRRRIEPHEFEVFFDPRELRKETCLLYEINWGGRHSIWRHTSQNTNKHVEVNFIEKFTTERYFCPNTRCSITWFLSYSPCGECSRAITEFLSRYPHVTLFIYIARLYHHADPRNRQGLEDLISSGVTIQIMTEQESGYCWRNFVNYSPSNEAHWPRYPHLWVRLYVLELYCIILGLPPCLNILRRKQPQLTFFTIALQSCHYQRLPPHILWATGLK

SEQ ID NO: 589 - protein, 229 aa, synthetic construct
MSSETGPVAVDPTLRRRIEPHEFEVFFDPRELRKETCLLYEINWGGRHSIWRHTSQNTNKHVEVNFIEKFTTERYFCPNTRCSITWFLSYSPCGECSRAITEFLSRYPHVTLFIYIARLYHHADPENRQGLEDLISSGVTIQIMTEQESGYCWRNFVNYSPSNEAHWPRYPHLWVRLYVLELYCIILGLPPCLNILRRKQPQLTFFTIALQSCHYQRLPPHILWATGLK

SEQ ID NO: 590 - protein, 229 aa, synthetic construct
MSSETGPVAVDPTLRRRIEPHEFEVFFDPRELRKETCLLYEINWGGRHSIWRHTSQNTNKHVEVNFIEKFTTERYFCPNTRCSITWFLSWSPCGECSRAITEFLSRYPHVTLFIYIARLYHHADPENRQGLEDLISSGVTIQIMTEQESGYCWRNFVNYSPSNEAHWPRYPHLWVRLYVLELYCIILGLPPCLNILRRKQPQLTFFTIALQSCHYQRLPPHILWATGLK

SEQ ID NO: 591 - protein, 229 aa, synthetic construct
MSSETGPVAVDPTLRRRIEPHEFEVFFDPRELAKETCLLYEINWGGRHSIWRHTSQNTNKHVEVNFIEKFTTERYFCPNTRCSITWFLSWSPCGECSRAITEFLSRYPHVTLFIYIARLYHHADPRNRQGLRDLISSGVTIQIMTEQESGYCWRNFVNYSPSNEAHWPRYPHLWVRLYVLELYCIILGLPPCLNILRRKQPQLTFFTIALQSCHYQRLPPHILWATGLK

SEQ ID NO: 592 - protein, 229 aa, synthetic construct
MSSETGPVAVDPTLRRRIEPHEFEVFFDPRELAAETCLLYEINWGGRHSIWRHTSQNTNKHVEVNFIEKFTTERYFCPNTRCSITWFLSWSPCGECSRAITEFLSRYPHVTLFIYIARLYHHADPRNRQGLRDLISSGVTIQIMTEQESGYCWRNFVNYSPSNEAHWPRYPHLWVRLYVLELYCIILGLPPCLNILRRKQPQLTFFTIALQSCHYQRLPPHILWATGLK

SEQ ID NO: 593 - protein, 229 aa, synthetic construct
MSSETGPVAVDPTLRRRIEPHEFEVFFDPRELAAETCLLYEINWGGRHSIWRHTSQNTNKHVEVNFIEKFTTERYFCPNTRCSITWFLSWSPCGECSRAITEFLSRYPHVTLFIYIARLYHLANPRNRQGLRDLISSGVTIQIMTEQESGYCWRNFVNYSPSNEAHWPRYPHLWVRLYVLELYCIILGLPPCLNILRRKQPQLTFFTIALQSCHYQRLPPHILWATGLK

SEQ ID NO: 594 - protein, 162 aa, synthetic construct
MFERNYDPRELRKETYLLYEIKWGKSGKLWRHWCQNNRTQHAEVYFLENIFNARRFNPSTHCSITWYLSWSPCAECSQKIVDFLKEHPNVNLEIYVARLYYHEDERNRQGLRDLVNSGVTIRIMDLPDYNYCWKTFVSDQGGDEDYWPGHFAPWIKQYSLKL

SEQ ID NO: 595 - protein, 162 aa, synthetic construct
MFERNYDPRELRKETYLLYEIKWGKSGKLWRHWCQNNRTQHAEVYFLENIFNARRFNPSTHCSITWYLSWSPCAECSQKIVDFLKEHPNVNLEIYVARLYYPENERNRQGLRDLVNSGVTIRIMDLPDYNYCWKTFVSDQGGDEDYWPGHFAPWIKQYSLKL

SEQ ID NO: 596 - skipped

SEQ ID NO: 597 - protein, 1853 aa, synthetic construct; identical to SEQ ID NO: 553

SEQ ID NO: 598 - protein, 1824 aa, synthetic construct
MSSETGPVAVDPTLRRRIEPHEFEVFFDPRELRKETCLLYEINWGGRHSIWRHTSQNTNKHVEVNFIEKFTTERYFCPNTRCSITWFLSWSPCGECSRAITEFLSRYPHVTLFIYIARLYHHADPRNRQGLRDLISSGVTIQIMTEQESGYCWRNFVNYSPSNEAHWPRYPHLWVRLYVLELYCIILGLPPCLNILRRKQPQLTFFTIALQSCHYQRLPPHILWATGLKSGGSSGGSSGSETPGTSESATPESSGGSSGGSDKKYSIGLAIGTNSVGWAVITDEYKVPSKKFKVLGNTDRHSIKKNLIGALLFDSGETAEATRLKRTARRRYTRRKNRICYLQEIFSNEMAKVDDSFFHRLEESFLVEEDKKHERHPIFGNIVDEVAYHEKYPTIYHLRKKLVDSTDKADLRLIYLALAHMIKFRGHFLIEGDLNPDNSDVDKLFIQLVQTYNQLFEENPINASGVDAKAILSARLSKSRRLENLIAQLPGEKKNGLFGNLIALSLGLTPNFKSNFDLAEDAKLQLSKDTYDDDLDNLLAQIGDQYADLFLAAKNLSDAILLSDILRVNTEITKAPLSASMIKRYDEHHQDLTLLKALVRQQLPEKYKEIFFDQSKNGYAGYIDGGASQEEFYKFIKPILEKMDGTEELLVKLNREDLLRKQRTFDNGSIPHQIHLGELHAILRRQEDFYPFLKDNREKIEKILTFRIPYYVGPLARGNSRFAWMTRKSEETITPWNFEEVVDKGASAQSFIERMTNFDKNLPNEKVLPKHSLLYEYFTVYNELTKVKYVTEGMRKPAFLSGEQKKAIVDLLFKTNRKVTVKQLKEDYFKKIECFDSVEISGVEDRFNASLGTYHDLLKIIKDKDFLDNEENEDILEDIVLTLTLFEDREMIEERLKTYAHLFDDKVMKQLKRRRYTGWGRLSRKLINGIRDKQSGKTILDFLKSDGFANRNFMQLIHDDSLTFKEDIQKAQVSGQGDSLHEHIANLAGSPAIKKGILQTVKVVDELVKVMGRHKPENIVIEMARENQTTQKGQKNSRERMKRIEEGIKELGSQILKEHPVENTQLQNEKLYLYYLQNGRDMYVDQELDINRLSDYDVDHIVPQSFLKDDSIDNKVLTRSDKNRGKSDNVPSEEVVKKMKNYWRQLLNAKLITQRKFDNLTKAERGGLSELDKAGFIKRQLVETRQITKHVAQILDSRMNTKYDENDKLIREVKVITLKSKLVSDFRKDFQFYKVREINNYHHAHDAYLNAVVGTALIKKYPKLESEFVYGDYKVYDVRKMIAKSEQEIGKATAKYFFYSNIMNFFKTEITLANGEIRKRPLIETNGETGEIVWDKGRDFATVRKVLSMPQVNIVKKTEVQTGGFSKESILPKRNSDKLIARKKDWDPKKYGGFDSPTVAYSVLVVAKVEKGKSKKLKSVKELLGITIMERSSFEKNPIDFLEAKGYKEVKKDLIIKLPKYSLFELENGRKRMLASAGELQKGNELALPSKYVNFLYLASHYEKLKGSPEDNEQKQLFVEQHKHYLDEIIEQISEFSKRVILADANLDKVLSAYNKHRDKPIREQAENIIHLFTLTNLGAPAAFKYFDTTIDRKRYTSTKEVLDATLIHQSITGLYETRIDLSQLGGDSGGSGGSGGSTNLSDIIEKETGKQLVIQESILMLPEEVEEVIGNKPESDILVHTAYDESTDENVMLLTSDAPEYKPWALVIQDSNGENKIKMLSGGSGGSGGSTNLSDIIEKETGKQLVIQESILMLPEEVEEVIGNKPESDILVHTAYDESTDENVMLLTSDAPEYKPWALVIQDSNGENKIKMLSGGSPKKKRK

SEQ ID NO: 599 - protein, 1838 aa, synthetic construct
MHHHHHHHHGSGGSGSSETGPVAVDPTLRRRIEPHEFEVFFDPRELRKETCLLYEINWGGRHSIWRHTSQNTNKHVEVNFIEKFTTERYFCPNTRCSITWFLSWSPCGECSRAITEFLSRYPHVTLFIYIARLYHHADPRNRQGLRDLISSGVTIQIMTEQESGYCWRNFVNYSPSNEAHWPRYPHLWVRLYVLELYCIILGLPPCLNILRRKQPQLTFFTIALQSCHYQRLPPHILWATGLKSGGSSGGSSGSETPGTSESATPESSGGSSGGSDKKYSIGLAIGTNSVGWAVITDEYKVPSKKFKVLGNTDRHSIKKNLIGALLFDSGETAEATRLKRTARRRYTRRKNRICYLQEIFSNEMAKVDDSFFHRLEESFLVEEDKKHERHPIFGNIVDEVAYHEKYPTIYHLRKKLVDSTDKADLRLIYLALAHMIKFRGHFLIEGDLNPDNSDVDKLFIQLVQTYNQLFEENPINASGVDAKAILSARLSKSRRLENLIAQLPGEKKNGLFGNLIALSLGLTPNFKSNFDLAEDAKLQLSKDTYDDDLDNLLAQIGDQYADLFLAAKNLSDAILLSDILRVNTEITKAPLSASMIKRYDEHHQDLTLLKALVRQQLPEKYKEIFFDQSKNGYAGYIDGGASQEEFYKFIKPILEKMDGTEELLVKLNREDLLRKQRTFDNGSIPHQIHLGELHAILRRQEDFYPFLKDNREKIEKILTFRIPYYVGPLARGNSRFAWMTRKSEETITPWNFEEVVDKGASAQSFIERMTNFDKNLPNEKVLPKHSLLYEYFTVYNELTKVKYVTEGMRKPAFLSGEQKKAIVDLLFKTNRKVTVKQLKEDYFKKIECFDSVEISGVEDRFNASLGTYHDLLKIIKDKDFLDNEENEDILEDIVLTLTLFEDREMIEERLKTYAHLFDDKVMKQLKRRRYTGWGRLSRKLINGIRDKQSGKTILDFLKSDGFANRNFMQLIHDDSLTFKEDIQKAQVSGQGDSLHEHIANLAGSPAIKKGILQTVKVVDELVKVMGRHKPENIVIEMARENQTTQKGQKNSRERMKRIEEGIKELGSQILKEHPVENTQLQNEKLYLYYLQNGRDMYVDQELDINRLSDYDVDHIVPQSFLKDDSIDNKVLTRSDKNRGKSDNVPSEEVVKKMKNYWRQLLNAKLITQRKFDNLTKAERGGLSELDKAGFIKRQLVETRQITKHVAQILDSRMNTKYDENDKLIREVKVITLKSKLVSDFRKDFQFYKVREINNYHHAHDAYLNAVVGTALIKKYPKLESEFVYGDYKVYDVRKMIAKSEQEIGKATAKYFFYSNIMNFFKTEITLANGEIRKRPLIETNGETGEIVWDKGRDFATVRKVLSMPQVNIVKKTEVQTGGFSKESILPKRNSDKLIARKKDWDPKKYGGFDSPTVAYSVLVVAKVEKGKSKKLKSVKELLGITIMERSSFEKNPIDFLEAKGYKEVKKDLIIKLPKYSLFELENGRKRMLASAGELQKGNELALPSKYVNFLYLASHYEKLKGSPEDNEQKQLFVEQHKHYLDEIIEQISEFSKRVILADANLDKVLSAYNKHRDKPIREQAENIIHLFTLTNLGAPAAFKYFDTTIDRKRYTSTKEVLDATLIHQSITGLYETRIDLSQLGGDSGGSGGSGGSTNLSDIIEKETGKQLVIQESILMLPEEVEEVIGNKPESDILVHTAYDESTDENVMLLTSDAPEYKPWALVIQDSNGENKIKMLSGGSGGSGGSTNLSDIIEKETGKQLVIQESILMLPEEVEEVIGNKPESDILVHTAYDESTDENVMLLTSDAPEYKPWALVIQDSNGENKIKMLSGGSPKKKRK

SEQ ID NO: 600 - protein, 1853 aa, synthetic construct; identical to SEQ ID NO: 553

SEQ ID NO: 601 - protein, 1853 aa, synthetic construct
MKRTADGSEFESPKKKRKVSSETGPVAVDPTLRRRIEPHEFEVFFDPRELRKETCLLYEIKWGTSHKIWRHSSKNTTKHVEVNFIEKFTSERHFCPSTSCSITWFLSWSPCGECSKAITEFLSQHPNVTLVIYVARLYHHMDQQNRQGLRDLVNSGVTIQIMTAPEYDYCWRNFVNYPPGKEAHWPRYPPLWMKLYALELHAGILGLPPCLNILRRKQPQLTFFTIALQSCHYQRLPPHILWATGLKSGGSSGGSSGSETPGTSESATPESSGGSSGGSDKKYSIGLAIGTNSVGWAVITDEYKVPSKKFKVLGNTDRHSIKKNLIGALLFDSGETAEATRLKRTARRRYTRRKNRICYLQEIFSNEMAKVDDSFFHRLEESFLVEEDKKHERHPIFGNIVDEVAYHEKYPTIYHLRKKLVDSTDKADLRLIYLALAHMIKFRGHFLIEGDLNPDNSDVDKLFIQLVQTYNQLFEENPINASGVDAKAILSARLSKSRRLENLIAQLPGEKKNGLFGNLIALSLGLTPNFKSNFDLAEDAKLQLSKDTYDDDLDNLLAQIGDQYADLFLAAKNLSDAILLSDILRVNTEITKAPLSASMIKRYDEHHQDLTLLKALVRQQLPEKYKEIFFDQSKNGYAGYIDGGASQEEFYKFIKPILEKMDGTEELLVKLNREDLLRKQRTFDNGSIPHQIHLGELHAILRRQEDFYPFLKDNREKIEKILTFRIPYYVGPLARGNSRFAWMTRKSEETITPWNFEEVVDKGASAQSFIERMTNFDKNLPNEKVLPKHSLLYEYFTVYNELTKVKYVTEGMRKPAFLSGEQKKAIVDLLFKTNRKVTVKQLKEDYFKKIECFDSVEISGVEDRFNASLGTYHDLLKIIKDKDFLDNEENEDILEDIVLTLTLFEDREMIEERLKTYAHLFDDKVMKQLKRRRYTGWGRLSRKLINGIRDKQSGKTILDFLKSDGFANRNFMQLIHDDSLTFKEDIQKAQVSGQGDSLHEHIANLAGSPAIKKGILQTVKVVDELVKVMGRHKPENIVIEMARENQTTQKGQKNSRERMKRIEEGIKELGSQILKEHPVENTQLQNEKLYLYYLQNGRDMYVDQELDINRLSDYDVDHIVPQSFLKDDSIDNKVLTRSDKNRGKSDNVPSEEVVKKMKNYWRQLLNAKLITQRKFDNLTKAERGGLSELDKAGFIKRQLVETRQITKHVAQILDSRMNTKYDENDKLIREVKVITLKSKLVSDFRKDFQFYKVREINNYHHAHDAYLNAVVGTALIKKYPKLESEFVYGDYKVYDVRKMIAKSEQEIGKATAKYFFYSNIMNFFKTEITLANGEIRKRPLIETNGETGEIVWDKGRDFATVRKVLSMPQVNIVKKTEVQTGGFSKESILPKRNSDKLIARKKDWDPKKYGGFDSPTVAYSVLVVAKVEKGKSKKLKSVKELLGITIMERSSFEKNPIDFLEAKGYKEVKKDLIIKLPKYSLFELENGRKRMLASAGELQKGNELALPSKYVNFLYLASHYEKLKGSPEDNEQKQLFVEQHKHYLDEIIEQISEFSKRVILADANLDKVLSAYNKHRDKPIREQAENIIHLFTLTNLGAPAAFKYFDTTIDRKRYTSTKEVLDATLIHQSITGLYETRIDLSQLGGDSGGSGGSGGSTNLSDIIEKETGKQLVIQESILMLPEEVEEVIGNKPESDILVHTAYDESTDENVMLLTSDAPEYKPWALVIQDSNGENKIKMLSGGSGGSGGSTNLSDIIEKETGKQLVIQESILMLPEEVEEVIGNKPESDILVHTAYDESTDENVMLLTSDAPEYKPWALVIQDSNGENKIKMLSGGSKRTADGSEFEPKKKRKV

SEQ ID NO: 602 - protein, 1853 aa, synthetic construct
MKRTADGSEFESPKKKRKVSSETGPVAVDPTLRRRIEPHEFEVFFDPRELRKEACLLYEIKWGTSHKIWRNSGKNTTKHVEVNFIEKFTSERHFCPSISCSITWFLSWSPCWECSKAIREFLSQHPNVTLVIYVARLFQHMDQQNRQGLRDLVNSGVTIQIMTASEYDHCWRNFVNYPPGKEAHWPRYPPLWMKLYALELHAGILGLPPCLNILRRKQPQLTFFTIALQSCHYQRLPPHILWATGLKSGGSSGGSSGSETPGTSESATPESSGGSSGGSDKKYSIGLAIGTNSVGWAVITDEYKVPSKKFKVLGNTDRHSIKKNLIGALLFDSGETAEATRLKRTARRRYTRRKNRICYLQEIFSNEMAKVDDSFFHRLEESFLVEEDKKHERHPIFGNIVDEVAYHEKYPTIYHLRKKLVDSTDKADLRLIYLALAHMIKFRGHFLIEGDLNPDNSDVDKLFIQLVQTYNQLFEENPINASGVDAKAILSARLSKSRRLENLIAQLPGEKKNGLFGNLIALSLGLTPNFKSNFDLAEDAKLQLSKDTYDDDLDNLLAQIGDQYADLFLAAKNLSDAILLSDILRVNTEITKAPLSASMIKRYDEHHQDLTLLKALVRQQLPEKYKEIFFDQSKNGYAGYIDGGASQEEFYKFIKPILEKMDGTEELLVKLNREDLLRKQRTFDNGSIPHQIHLGELHAILRRQEDFYPFLKDNREKIEKILTFRIPYYVGPLARGNSRFAWMTRKSEETITPWNFEEVVDKGASAQSFIERMTNFDKNLPNEKVLPKHSLLYEYFTVYNELTKVKYVTEGMRKPAFLSGEQKKAIVDLLFKTNRKVTVKQLKEDYFKKIECFDSVEISGVEDRFNASLGTYHDLLKIIKDKDFLDNEENEDILEDIVLTLTLFEDREMIEERLKTYAHLFDDKVMKQLKRRRYTGWGRLSRKLINGIRDKQSGKTILDFLKSDGFANRNFMQLIHDDSLTFKEDIQKAQVSGQGDSLHEHIANLAGSPAIKKGILQTVKVVDELVKVMGRHKPENIVIEMARENQTTQKGQKNSRERMKRIEEGIKELGSQILKEHPVENTQLQNEKLYLYYLQNGRDMYVDQELDINRLSDYDVDHIVPQSFLKDDSIDNKVLTRSDKNRGKSDNVPSEEVVKKMKNYWRQLLNAKLITQRKFDNLTKAERGGLSELDKAGFIKRQLVETRQITKHVAQILDSRMNTKYDENDKLIREVKVITLKSKLVSDFRKDFQFYKVREINNYHHAHDAYLNAVVGTALIKKYPKLESEFVYGDYKVYDVRKMIAKSEQEIGKATAKYFFYSNIMNFFKTEITLANGEIRKRPLIETNGETGEIVWDKGRDFATVRKVLSMPQVNIVKKTEVQTGGFSKESILPKRNSDKLIARKKDWDPKKYGGFDSPTVAYSVLVVAKVEKGKSKKLKSVKELLGITIMERSSFEKNPIDFLEAKGYKEVKKDLIIKLPKYSLFELENGRKRMLASAGELQKGNELALPSKYVNFLYLASHYEKLKGSPEDNEQKQLFVEQHKHYLDEIIEQISEFSKRVILADANLDKVLSAYNKHRDKPIREQAENIIHLFTLTNLGAPAAFKYFDTTIDRKRYTSTKEVLDATLIHQSITGLYETRIDLSQLGGDSGGSGGSGGSTNLSDIIEKETGKQLVIQESILMLPEEVEEVIGNKPESDILVHTAYDESTDENVMLLTSDAPEYKPWALVIQDSNGENKIKMLSGGSGGSGGSTNLSDIIEKETGKQLVIQESILMLPEEVEEVIGNKPESDILVHTAYDESTDENVMLLTSDAPEYKPWALVIQDSNGENKIKMLSGGSKRTADGSEFEPKKKRKV

SEQ ID NO: 603 - skipped

SEQ ID NO: 604 - DNA, 684 bp, Rattus sp.
  source 1..684: mol_type = other DNA
tcctcagagactgggcctgtcgccgtcgatccaaccctgcgccgccggattgaacctcacgagtttgaagtgttctttgacccccgggagctgagaaaggagacatgcctgctgtacgagatcaactggggaggcaggcactccatctggaggcacacctctcagaacacaaataagcacgtggaggtgaacttcatcgagaagtttaccacagagcggtacttctgccccaataccagatgtagcatcacatggtttctgagctggtccccttgcggagagtgtagcagggccatcaccgagttcctgtccagatatccacacgtgacactgtttatctacatcgccaggctgtatcaccacgcagacccaaggaataggcagggcctgcgcgatctgatcagctccggcgtgaccatccagatcatgacagagcaggagtccggctactgctggcggaacttcgtgaattattctcctagcaacgaggcccactggcctaggtacccacacctgtgggtgcgcctgtacgtgctggagctgtattgcatcatcctgggcctgcccccttgtctgaatatcctgcggagaaagcagccccagctgaccttctttacaatcgccctgcagtcttgtcactatcagaggctgccaccccacatcctgtgggccacaggcctgaag

SEQ ID NO: 605 - DNA, 686 bp, synthetic construct
  source 1..686: mol_type = other DNA
agcagtgaaaccggaccagtggcagtggacccaaccctgaggagacggattgagccccatgaatttgaagtgttctttgacccaagggagctgaggaaggagacatgcctgctgtacgagatcaagtggggcacaagccacaagatctggcgccacagctccaagaacaccacaaagcacgtggaagtgaatttcatcgagaagtttacctccgagcggcacttctgcccctctaccagctgttccatcacatggtttctgtcttggagcccttgcggcgagtgttccaaggccatcaccgagttcctgtctcagcaccctaacgtgaccctggtcatctacgtggcccggctgtatcaccacatggaccagcagaacaggcagggcctgcgcgatctggtgaattctggcgtgaccatccagatcatgacagccccagagtacgactattgctggcggaacttcgtgaattatccacctggcaaggaggcacactggccaagatacccacccctgtggatgaagctgtatgcactggagctgcacgcaggaatcctgggcctgcctccatgtctgaatatcctgcggagaaagcagccccagctgacatttttcaccattgctctgcagtcttgtcactatcagcggctgcctcctcatattctgtgggctacaggcctttgaaa

SEQ ID NO: 606 - DNA, 686 bp, synthetic construct
  source 1..686: mol_type = other DNA
tcatcagaaacaggaccagtcgccgtggacccaacactgaggagaaggattgagccccatgaatttgaagtctttttcgaccccagggagctgaggaaggaggcatgcctgctgtacgagatcaagtggggcacaagccacaagatctggcgcaacagcggcaagaacaccacaaagcacgtggaagtgaatttcatcgagaagtttacctccgagcggcacttctgcccctctatcagctgttccatcacatggtttctgtcttggagcccttgctgggagtgttccaaggccatccgcgagttcctgtctcagcaccctaacgtgaccctggtcatctacgtggcccggctgtttcaacacatggaccagcagaacaggcagggcctgcgcgatctggtgaattctggcgtgaccatccagatcatgacagcctcagagtacgaccattgctggcggaacttcgtgaattatccacctggcaaggaggcacactggccaagatacccacccctgtggatgaagctgtatgcactggagctgcacgcaggaatcctgggcctgcctccatgtctgaatatcctgcggagaaagcagccccagctgacatttttcactatcgcactgcagagctgtcattaccagagactgcctcctcatatcctgtgggctacaggcctttgaaa

SEQ ID NO: 607 - DNA, 686 bp, synthetic construct
  source 1..686: mol_type = other DNA
agcagcgagacaggacccgtggcagtggaccctacactgaggaggaggattgagcccgaatttttcaacaggaactacgaccccagagagctgcggaaggagacatacctgctgtatgagatcaagtggggcaaggagtccaagatctggcggcacacctctaacaatagaacacagcacgccgaggtgaacttcctggagaacttctttaatgagctgtactttaatccttctacccactgcagcatcacatggttcctgagctggtccccatgcggcgagtgttctaaggccatcgtggagtttctgaaggagcaccccaacgtgaatctggagatctacgtggccaggctgtatctgtgcgaggacgagaggaacaggcagggcctgcgggatctggtgaatagcggcgtgaccatcagaatcatgaacctgcctgactacaattattgttggcgcacattcgtgtcccaccagggaggcgacgaggattattggccaaggcactttgcaccatgggtgcgcctgtacgtgctggagctgtattgcatcatcctgggcctgcccccttgtctgaacatcctgcggagaaagcagccccagctgacattcttcaccatcgcactgcagagttgtcattaccagcgactgcctcctcatatcctgtgggctacaggcctttgaaa

SEQ ID NO: 608 - DNA, 686 bp, synthetic construct
  source 1..686: mol_type = other DNA
tcatcagagaccggacctgtggcagtggacccaaccctgcgacggagaatcgagcccttttactttcagttcaacaacgacccaagagcctgccggagaaagacctacctgtgctatgagctgaagcaggacggctctacctgggtgtggaagcggacactgcacaacaagggcagacacgccgagatctgcttcctggagaagatcagctccctggagaagctggaccctgcccagcactacaggatcacatggtatatgtcttggagcccatgctccaactgtgcccagaagatcgtggattttctgaaggagcacccacacgtgaatctgcggatctacgtggccagactgtactatcacgaggaggagaggtatcaggagggcctgaggaacctgaggcgctccggcgtgtctatcagagtgatggacctgcccgatttcgagcactgctgggagacattcgtggataacggaggaggacctttccagccatggcccggcctggaggagctgaatagcaagcagctgtcccggagactgcaggcaggaatcctgggcctgcccccttgtctgaatatcctgaggcgcaagcagccccagctgacatttttcaccatcgcactgcagagttgtcattatcagcgactgcctcctcatatcctgtgggctacaggcctttgaaa

SEQ ID NO: 609 - DNA, 686 bp, synthetic construct
  source 1..686: mol_type = other DNA
agcagcgagaccggacctgtggcagtggacccaaccctgagaagacgcattgagccatttcattttcagtttaacaacgaccccagagcctaccggagaaagacctacctgtgctatgagctgaagcaggacggctccacctgggtgctggatcggacactgagaaacaagggccggcacgccgagatctgtttcctggacaagatcaattcctgggagaggctggatcccgcccagcactaccgcgtgacatggtatatgagctggtccccttgctctaactgtgcccagcaggtggtggatttcctgaaggagcacccacacgtgaatctgcggatctttgccgccagactgtactatcacgagcagaggcgctatcaggagggcctgcggagcctgaggggaagcggagtgcctgtggccgtgatgaccctgccagacttcgagcactgctgggagacatttgtggatcacggcggccggccattccagccatgggacggcctggaggagctgaactctaggagcctgtcccggagactgcaggcaggaatcctgggcctgcccccttgtctgaatatcctgaggcgcaagcagccccagctgaccttttttaccatcgcactgcagagttgtcactaccagagactgcctcctcatatcctgtgggctacaggcctttgaaa

SEQ ID NO: 610 - DNA, 1368 bp, Rattus sp.
  source 1..1368: mol_type = other DNA
tcctcagagactgggcctgtcgccgtcgatccaaccctgcgccgccggattgaacctcacgagtttgaagtgttctttgacccccgggagctgagaaaggagacatgcctgctgtacgagatcaactggggaggcaggcactccatctggaggcacacctctcagaacacaaataagcacgtggaggtgaacttcatcgagaagtttaccacagagcggtacttctgccccaataccagatgtagcatcacatggtttctgagctggtccccttgcggagagtgtagcagggccatcaccgagttcctgtccagatatccacacgtgacactgtttatctacatcgccaggctgtatcaccacgcagacccaaggaataggcagggcctgcgcgatctgatcagctccggcgtgaccatccagatcatgacagagcaggagtccggctactgctggcggaacttcgtgaattattctcctagcaacgaggcccactggcctaggtacccacacctgtgggtgcgcctgtacgtgctggagctgtattgcatcatcctgggcctgcccccttgtctgaatatcctgcggagaaagcagccccagctgaccttctttacaatcgccctgcagtcttgtcactatcagaggctgccaccccacatcctgtgggccacaggcctgaagtcctcagagactgggcctgtcgccgtcgatccaaccctgcgccgccggattgaacctcacgagtttgaagtgttctttgacccccgggagctgagaaaggagacatgcctgctgtacgagatcaactggggaggcaggcactccatctggaggcacacctctcagaacacaaataagcacgtggaggtgaacttcatcgagaagtttaccacagagcggtacttctgccccaataccagatgtagcatcacatggtttctgagctggtccccttgcggagagtgtagcagggccatcaccgagttcctgtccagatatccacacgtgacactgtttatctacatcgccaggctgtatcaccacgcagacccaaggaataggcagggcctgcgcgatctgatcagctccggcgtgaccatccagatcatgacagagcaggagtccggctactgctggcggaacttcgtgaattattctcctagcaacgaggcccactggcctaggtacccacacctgtgggtgcgcctgtacgtgctggagctgtattgcatcatcctgggcctgcccccttgtctgaatatcctgcggagaaagcagccccagctgaccttctttacaatcgccctgcagtcttgtcactatcagaggctgccaccccacatcctgtgggccacaggcctgaag

SEQ ID NO: 611 - DNA, 684 bp, synthetic construct
  source 1..684: mol_type = other DNA
agcagtgaaaccggaccagtggcagtggacccaaccctgaggagacggattgagccccatgaatttgaagtgttctttgacccaagggagctgaggaaggagacatgcctgctgtacgagatcaagtggggcacaagccacaagatctggcgccacagctccaagaacaccacaaagcacgtggaagtgaatttcatcgagaagtttacctccgagcggcacttctgcccctctaccagctgttccatcacatggtttctgtcttggagcccttgcggcgagtgttccaaggccatcaccgagttcctgtctcagcaccctaacgtgaccctggtcatctacgtggcccggctgtatcaccacatggaccagcagaacaggcagggcctgcgcgatctggtgaattctggcgtgaccatccagatcatgacagccccagagtacgactattgctggcggaacttcgtgaattatccacctggcaaggaggcacactggccaagatacccacccctgtggatgaagctgtatgcactggagctgcacgcaggaatcctgggcctgcctccatgtctgaatatcctgcggagaaagcagccccagctgacatttttcaccattgctctgcagtcttgtcactatcagcggctgcctcctcatattctgtgggctacaggccttaaa

SEQ ID NO: 612 - DNA, 684 bp, synthetic construct
  source 1..684: mol_type = other DNA
tcatcagaaacaggaccagtcgccgtggacccaacactgaggagaaggattgagccccatgaatttgaagtctttttcgaccccagggagctgaggaaggaggcatgcctgctgtacgagatcaagtggggcacaagccacaagatctggcgcaacagcggcaagaacaccacaaagcacgtggaagtgaatttcatcgagaagtttacctccgagcggcacttctgcccctctatcagctgttccatcacatggtttctgtcttggagcccttgctgggagtgttccaaggccatccgcgagttcctgtctcagcaccctaacgtgaccctggtcatctacgtggcccggctgtttcaacacatggaccagcagaacaggcagggcctgcgcgatctggtgaattctggcgtgaccatccagatcatgacagcctcagagtacgaccattgctggcggaacttcgtgaattatccacctggcaaggaggcacactggccaagatacccacccctgtggatgaagctgtatgcactggagctgcacgcaggaatcctgggcctgcctccatgtctgaatatcctgcggagaaagcagccccagctgacatttttcactatcgcactgcagagctgtcattaccagagactgcctcctcatatcctgtgggctacaggccttaaa

SEQ ID NO: 613 - DNA, 684 bp, synthetic construct
  source 1..684: mol_type = other DNA
agcagcgagacaggacccgtggcagtggaccctacactgaggaggaggattgagcccgaatttttcaacaggaactacgaccccagagagctgcggaaggagacatacctgctgtatgagatcaagtggggcaaggagtccaagatctggcggcacacctctaacaatagaacacagcacgccgaggtgaacttcctggagaacttctttaatgagctgtactttaatccttctacccactgcagcatcacatggttcctgagctggtccccatgcggcgagtgttctaaggccatcgtggagtttctgaaggagcaccccaacgtgaatctggagatctacgtggccaggctgtatctgtgcgaggacgagaggaacaggcagggcctgcgggatctggtgaatagcggcgtgaccatcagaatcatgaacctgcctgactacaattattgttggcgcacattcgtgtcccaccagggaggcgacgaggattattggccaaggcactttgcaccatgggtgcgcctgtacgtgctggagctgtattgcatcatcctgggcctgcccccttgtctgaacatcctgcggagaaagcagccccagctgacattcttcaccatcgcactgcagagttgtcattaccagcgactgcctcctcatatcctgtgggctacaggccttaaa

SEQ ID NO: 614 - DNA, 684 bp, synthetic construct
  source 1..684: mol_type = other DNA
tcatcagagaccggacctgtggcagtggacccaaccctgcgacggagaatcgagcccttttactttcagttcaacaacgacccaagagcctgccggagaaagacctacctgtgctatgagctgaagcaggacggctctacctgggtgtggaagcggacactgcacaacaagggcagacacgccgagatctgcttcctggagaagatcagctccctggagaagctggaccctgcccagcactacaggatcacatggtatatgtcttggagcccatgctccaactgtgcccagaagatcgtggattttctgaaggagcacccacacgtgaatctgcggatctacgtggccagactgtactatcacgaggaggagaggtatcaggagggcctgaggaacctgaggcgctccggcgtgtctatcagagtgatggacctgcccgatttcgagcactgctgggagacattcgtggataacggaggaggacctttccagccatggcccggcctggaggagctgaatagcaagcagctgtcccggagactgcaggcaggaatcctgggcctgcccccttgtctgaatatcctgaggcgcaagcagccccagctgacatttttcaccatcgcactgcagagttgtcattatcagcgactgcctcctcatatcctgtgggctacaggccttaaa

SEQ ID NO: 615 - DNA, 684 bp, synthetic construct
  source 1..684: mol_type = other DNA
agcagcgagaccggacctgtggcagtggacccaaccctgagaagacgcattgagccatttcattttcagtttaacaacgaccccagagcctaccggagaaagacctacctgtgctatgagctgaagcaggacggctccacctgggtgctggatcggacactgagaaacaagggccggcacgccgagatctgtttcctggacaagatcaattcctgggagaggctggatcccgcccagcactaccgcgtgacatggtatatgagctggtccccttgctctaactgtgcccagcaggtggtggatttcctgaaggagcacccacacgtgaatctgcggatctttgccgccagactgtactatcacgagcagaggcgctatcaggagggcctgcggagcctgaggggaagcggagtgcctgtggccgtgatgaccctgccagacttcgagcactgctgggagacatttgtggatcacggcggccggccattccagccatgggacggcctggaggagctgaactctaggagcctgtcccggagactgcaggcaggaatcctgggcctgcccccttgtctgaatatcctgaggcgcaagcagccccagctgaccttttttaccatcgcactgcagagttgtcactaccagagactgcctcctcatatcctgtgggctacaggccttaaa

SEQ ID NO: 616 - DNA, 5559 bp, synthetic construct
  source 1..5559: mol_type = other DNA
atgaaacggacagccgacggaagcgagttcgagtcaccaaagaagaagcggaaagtctcctcagagactgggcctgtcgccgtcgatccaaccctgcgccgccggattgaacctcacgagtttgaagtgttctttgacccccgggagctgagaaaggagacatgcctgctgtacgagatcaactggggaggcaggcactccatctggaggcacacctctcagaacacaaataagcacgtggaggtgaacttcatcgagaagtttaccacagagcggtacttctgccccaataccagatgtagcatcacatggtttctgagctggtccccttgcggagagtgtagcagggccatcaccgagttcctgtccagatatccacacgtgacactgtttatctacatcgccaggctgtatcaccacgcagacccaaggaataggcagggcctgcgcgatctgatcagctccggcgtgaccatccagatcatgacagagcaggagtccggctactgctggcggaacttcgtgaattattctcctagcaacgaggcccactggcctaggtacccacacctgtgggtgcgcctgtacgtgctggagctgtattgcatcatcctgggcctgcccccttgtctgaatatcctgcggagaaagcagccccagctgaccttctttacaatcgccctgcagtcttgtcactatcagaggctgccaccccacatcctgtgggccacaggcctgaagtctggaggatctagcggaggatcctctggcagcgagacaccaggaacaagcgagtcagcaacaccagagagcagtggcggcagcagcggcggcagcgacaagaagtacagcatcggcctggacatcggcaccaactctgtgggctgggccgtgatcaccgacgagtacaaggtgcccagcaagaaattcaaggtgctgggcaacaccgaccggcacagcatcaagaagaacctgatcggagccctgctgttcgacagcggcgaaacagccgaggccacccggctgaagagaaccgccagaagaagatacaccagacggaagaaccggatctgctatctgcaagagatcttcagcaacgagatggccaaggtggacgacagcttcttccacagactggaagagtccttcctggtggaagaggataagaagcacgagcggcaccccatcttcggcaacatcgtggacgaggtggcctaccacgagaagtaccccaccatctaccacctgagaaagaaactggtggacagcaccgacaaggccgacctgcggctgatctatctggccctggcccacatgatcaagttccggggccacttcctgatcgagggcgacctgaaccccgacaacagcgacgtggacaagctgttcatccagctggtgcagacctacaaccagctgttcgaggaaaaccccatcaacgccagcggcgtggacgccaaggccatcctgtctgccagactgagcaagagcagacggctggaaaatctgatcgcccagctgcccggcgagaagaagaatggcctgttcggaaacctgattgccctgagcctgggcctgacccccaacttcaagagcaacttcgacctggccgaggatgccaaactgcagctgagcaaggacacctacgacgacgacctggacaacctgctggcccagatcggcgaccagtacgccgacctgtttctggccgccaagaacctgtccgacgccatcctgctgagcgacatcctgagagtgaacaccgagatcaccaaggcccccctgagcgcctctatgatcaagagatacgacgagcaccaccaggacctgaccctgctgaaagctctcgtgcggcagcagctgcctgagaagtacaaagagattttcttcgaccagagcaagaacggctacgccggctacattgacggcggagccagccaggaagagttctacaagttcatcaagcccatcctggaaaagatggacggcaccgaggaactgctcgtgaagctgaacagagaggacctgctgcggaagcagcggaccttcgacaacggcagcatcccccaccagatccacctgggagagctgcacgccattctgcggcggcaggaagatttttacccattcctgaaggacaaccgggaaaagatcgagaagatcctgaccttccgcatcccctactacgtgggccctctggccaggggaaacagcagattcgcctggatgaccagaaagagcgaggaaaccatcaccccctggaacttcgaggaagtggtggacaagggcgcttccgcccagagcttcatcgagcggatgaccaacttcgataagaacctgcccaacgagaaggtgctgcccaagcacagcctgctgtacgagtacttcaccgtgtataacgagctgaccaaagtgaaatacgtgaccgagggaatgagaaagcccgccttcctgagcggcgagcagaaaaaggccatcgtggacctgctgttcaagaccaaccggaaagtgaccgtgaagcagctgaaagaggactacttcaagaaaatcgagtgcttcgactccgtggaaatctccggcgtggaagatcggttcaacgcctccctgggcacataccacgatctgctgaaaattatcaaggacaaggacttcctggacaatgaggaaaacgaggacattctggaagatatcgtgctgaccctgacactgtttgaggacagagagatgatcgaggaacggctgaaaacctatgcccacctgttcgacgacaaagtgatgaagcagctgaagcggcggagatacaccggctggggcaggctgagccggaagctgatcaacggcatccgggacaagcagtccggcaagacaatcctggatttcctgaagtccgacggcttcgccaacagaaacttcatgcagctgatccacgacgacagcctgacctttaaagaggacatccagaaagcccaggtgtccggccagggcgatagcctgcacgagcacattgccaatctggccggcagccccgccattaagaagggcatcctgcagacagtgaaggtggtggacgagctcgtgaaagtgatgggccggcacaagcccgagaacatcgtgatcgaaatggccagagagaaccagaccacccagaagggacagaagaacagccgcgagagaatgaagcggatcgaagagggcatcaaagagctgggcagccagatcctgaaagaacaccccgtggaaaacacccagctgcagaacgagaagctgtacctgtactacctgcagaatgggcgggatatgtacgtggaccaggaactggacatcaaccggctgtccgactacgatgtggaccatatcgtgcctcagagctttctgaaggacgactccatcgacaacaaggtgctgaccagaagcgacaagaaccggggcaagagcgacaacgtgccctccgaagaggtcgtgaagaagatgaagaactactggcggcagctgctgaacgccaagctgattacccagagaaagttcgacaatctgaccaaggccgagagaggcggcctgagcgaactggataaggccggcttcatcaagagacagctggtggaaacccggcagatcacaaagcacgtggcacagatcctggactcccggatgaacactaagtacgacgagaatgacaagctgatccgggaagtgaaagtgatcaccctgaagtccaagctggtgtccgatttccggaaggatttccagttttacaaagtgcgcgagatcaacaactaccaccacgcccacgacgcctacctgaacgccgtcgtgggaaccgccctgatcaaaaagtaccctaagctggaaagcgagttcgtgtacggcgactacaaggtgtacgacgtgcggaagatgatcgccaagagcgagcaggaaatcggcaaggctaccgccaagtacttcttctacagcaacatcatgaactttttcaagaccgagattaccctggccaacggcgagatccggaagcggcctctgatcgagacaaacggcgaaaccggggagatcgtgtgggataagggccgggattttgccaccgtgcggaaagtgctgagcatgccccaagtgaatatcgtgaaaaagaccgaggtgcagacaggcggcttcagcaaagagtctatcctgcccaagaggaacagcgataagctgatcgccagaaagaaggactgggaccctaagaagtacggcggcttcgacagccccaccgtggcctattctgtgctggtggtggccaaagtggaaaagggcaagtccaagaaactgaagagtgtgaaagagctgctggggatcaccatcatggaaagaagcagcttcgagaagaatcccatcgactttctggaagccaagggctacaaagaagtgaaaaaggacctgatcatcaagctgcctaagtactccctgttcgagctggaaaacggccggaagagaatgctggcctctgccggcgaactgcagaagggaaacgaactggccctgccctccaaatatgtgaacttcctgtacctggccagccactatgagaagctgaagggctcccccgaggataatgagcagaaacagctgtttgtggaacagcacaagcactacctggacgagatcatcgagcagatcagcgagttctccaagagagtgatcctggccgacgctaatctggacaaagtgctgtccgcctacaacaagcaccgggataagcccatcagagagcaggccgagaatatcatccacctgtttaccctgaccaatctgggagcccctgccgccttcaagtactttgacaccaccatcgaccggaagaggtacaccagcaccaaagaggtgctggacgccaccctgatccaccagagcatcaccggcctgtacgagacacggatcgacctgtctcagctgggaggtgacagcggcgggagcggcgggagcggggggagcactaatctgagcgacatcattgagaaggagactgggaaacagctggtcattcaggagtccatcctgatgctgcctgaggaggtggaggaagtgatcggcaacaagccagagtctgacatcctggtgcacaccgcctacgacgagtccacagatgagaatgtgatgctgctgacctctgacgcccccgagtataagccttgggccctggtcatccaggattctaacggcgagaataagatcaagatgctgagcggaggatccggaggatctggaggcagcaccaacctgtctgacatcatcgagaaggagacaggcaagcagctggtcatccaggagagcatcctgatgctgcccgaagaagtcgaagaagtgatcggaaacaagcctgagagcgatatcctggtccataccgcctacgacgagagtaccgacgaaaatgtgatgctgctgacatccgacgccccagagtataagccctgggctctggtcatccaggattccaacggagagaacaaaatcaaaatgctgtctggcggctcaaaaagaaccgccgacggcagcgaattcgagcccaagaagaagaggaaagtc

SEQ ID NO: 617 - DNA, 5559 bp, synthetic construct
  source 1..5559: mol_type = other DNA
atgaaacggacagccgacggaagcgagttcgagtcaccaaagaagaagcggaaagtcagcagtgaaaccggaccagtggcagtggacccaaccctgaggagacggattgagccccatgaatttgaagtgttctttgacccaagggagctgaggaaggagacatgcctgctgtacgagatcaagtggggcacaagccacaagatctggcgccacagctccaagaacaccacaaagcacgtggaagtgaatttcatcgagaagtttacctccgagcggcacttctgcccctctaccagctgttccatcacatggtttctgtcttggagcccttgcggcgagtgttccaaggccatcaccgagttcctgtctcagcaccctaacgtgaccctggtcatctacgtggcccggctgtatcaccacatggaccagcagaacaggcagggcctgcgcgatctggtgaattctggcgtgaccatccagatcatgacagccccagagtacgactattgctggcggaacttcgtgaattatccacctggcaaggaggcacactggccaagatacccacccctgtggatgaagctgtatgcactggagctgcacgcaggaatcctgggcctgcctccatgtctgaatatcctgcggagaaagcagccccagctgacatttttcaccattgctctgcagtcttgtcactatcagcggctgcctcctcatattctgtgggctacaggccttaaatctggaggatctagcggaggatcctctggcagcgagacaccaggaacaagcgagtcagcaacaccagagagcagtggcggcagcagcggcggcagcgacaagaagtacagcatcggcctggacatcggcaccaactctgtgggctgggccgtgatcaccgacgagtacaaggtgcccagcaagaaattcaaggtgctgggcaacaccgaccggcacagcatcaagaagaacctgatcggagccctgctgttcgacagcggcgaaacagccgaggccacccggctgaagagaaccgccagaagaagatacaccagacggaagaaccggatctgctatctgcaagagatcttcagcaacgagatggccaaggtggacgacagcttcttccacagactggaagagtccttcctggtggaagaggataagaagcacgagcggcaccccatcttcggcaacatcgtggacgaggtggcctaccacgagaagtaccccaccatctaccacctgagaaagaaactggtggacagcaccgacaaggccgacctgcggctgatctatctggccctggcccacatgatcaagttccggggccacttcctgatcgagggcgacctgaaccccgacaacagcgacgtggacaagctgttcatccagctggtgcagacctacaaccagctgttcgaggaaaaccccatcaacgccagcggcgtggacgccaaggccatcctgtctgccagactgagcaagagcagacggctggaaaatctgatcgcccagctgcccggcgagaagaagaatggcctgttcggaaacctgattgccctgagcctgggcctgacccccaacttcaagagcaacttcgacctggccgaggatgccaaactgcagctgagcaaggacacctacgacgacgacctggacaacctgctggcccagatcggcgaccagtacgccgacctgtttctggccgccaagaacctgtccgacgccatcctgctgagcgacatcctgagagtgaacaccgagatcaccaaggcccccctgagcgcctctatgatcaagagatacgacgagcaccaccaggacctgaccctgctgaaagctctcgtgcggcagcagctgcctgagaagtacaaagagattttcttcgaccagagcaagaacggctacgccggctacattgacggcggagccagccaggaagagttctacaagttcatcaagcccatcctggaaaagatggacggcaccgaggaactgctcgtgaagctgaacagagaggacctgctgcggaagcagcggaccttcgacaacggcagcatcccccaccagatccacctgggagagctgcacgccattctgcggcggcaggaagatttttacccattcctgaaggacaaccgggaaaagatcgagaagatcctgaccttccgcatcccctactacgtgggccctctggccaggggaaacagcagattcgcctggatgaccagaaagagcgaggaaaccatcaccccctggaacttcgaggaagtggtggacaagggcgcttccgcccagagcttcatcgagcggatgaccaacttcgataagaacctgcccaacgagaaggtgctgcccaagcacagcctgctgtacgagtacttcaccgtgtataacgagctgaccaaagtgaaatacgtgaccgagggaatgagaaagcccgccttcctgagcggcgagcagaaaaaggccatcgtggacctgctgttcaagaccaaccggaaagtgaccgtgaagcagctgaaagaggactacttcaagaaaatcgagtgcttcgactccgtggaaatctccggcgtggaagatcggttcaacgcctccctgggcacataccacgatctgctgaaaattatcaaggacaaggacttcctggacaatgaggaaaacgaggacattctggaagatatcgtgctgaccctgacactgtttgaggacagagagatgatcgaggaacggctgaaaacctatgcccacctgttcgacgacaaagtgatgaagcagctgaagcggcggagatacaccggctggggcaggctgagccggaagctgatcaacggcatccgggacaagcagtccggcaagacaatcctggatttcctgaagtccgacggcttcgccaacagaaacttcatgcagctgatccacgacgacagcctgacctttaaagaggacatccagaaagcccaggtgtccggccagggcgatagcctgcacgagcacattgccaatctggccggcagccccgccattaagaagggcatcctgcagacagtgaaggtggtggacgagctcgtgaaagtgatgggccggcacaagcccgagaacatcgtgatcgaaatggccagagagaaccagaccacccagaagggacagaagaacagccgcgagagaatgaagcggatcgaagagggcatcaaagagctgggcagccagatcctgaaagaacaccccgtggaaaacacccagctgcagaacgagaagctgtacctgtactacctgcagaatgggcgggatatgtacgtggaccaggaactggacatcaaccggctgtccgactacgatgtggaccatatcgtgcctcagagctttctgaaggacgactccatcgacaacaaggtgctgaccagaagcgacaagaaccggggcaagagcgacaacgtgccctccgaagaggtcgtgaagaagatgaagaactactggcggcagctgctgaacgccaagctgattacccagagaaagttcgacaatctgaccaaggccgagagaggcggcctgagcgaactggataaggccggcttcatcaagagacagctggtggaaacccggcagatcacaaagcacgtggcacagatcctggactcccggatgaacactaagtacgacgagaatgacaagctgatccgggaagtgaaagtgatcaccctgaagtccaagctggtgtccgatttccggaaggatttccagttttacaaagtgcgcgagatcaacaactaccaccacgcccacgacgcctacctgaacgccgtcgtgggaaccgccctgatcaaaaagtaccctaagctggaaagcgagttcgtgtacggcgactacaaggtgtacgacgtgcggaagatgatcgccaagagcgagcaggaaatcggcaaggctaccgccaagtacttcttctacagcaacatcatgaactttttcaagaccgagattaccctggccaacggcgagatccggaagcggcctctgatcgagacaaacggcgaaaccggggagatcgtgtgggataagggccgggattttgccaccgtgcggaaagtgctgagcatgccccaagtgaatatcgtgaaaaagaccgaggtgcagacaggcggcttcagcaaagagtctatcctgcccaagaggaacagcgataagctgatcgccagaaagaaggactgggaccctaagaagtacggcggcttcgacagccccaccgtggcctattctgtgctggtggtggccaaagtggaaaagggcaagtccaagaaactgaagagtgtgaaagagctgctggggatcaccatcatggaaagaagcagcttcgagaagaatcccatcgactttctggaagccaagggctacaaagaagtgaaaaaggacctgatcatcaagctgcctaagtactccctgttcgagctggaaaacggccggaagagaatgctggcctctgccggcgaactgcagaagggaaacgaactggccctgccctccaaatatgtgaacttcctgtacctggccagccactatgagaagctgaagggctcccccgaggataatgagcagaaacagctgtttgtggaacagcacaagcactacctggacgagatcatcgagcagatcagcgagttctccaagagagtgatcctggccgacgctaatctggacaaagtgctgtccgcctacaacaagcaccgggataagcccatcagagagcaggccgagaatatcatccacctgtttaccctgaccaatctgggagcccctgccgccttcaagtactttgacaccaccatcgaccggaagaggtacaccagcaccaaagaggtgctggacgccaccctgatccaccagagcatcaccggcctgtacgagacacggatcgacctgtctcagctgggaggtgacagcggcgggagcggcgggagcggggggagcactaatctgagcgacatcattgagaaggagactgggaaacagctggtcattcaggagtccatcctgatgctgcctgaggaggtggaggaagtgatcggcaacaagccagagtctgacatcctggtgcacaccgcctacgacgagtccacagatgagaatgtgatgctgctgacctctgacgcccccgagtataagccttgggccctggtcatccaggattctaacggcgagaataagatcaagatgctgagcggaggatccggaggatctggaggcagcaccaacctgtctgacatcatcgagaaggagacaggcaagcagctggtcatccaggagagcatcctgatgctgcccgaagaagtcgaagaagtgatcggaaacaagcctgagagcgatatcctggtccataccgcctacgacgagagtaccgacgaaaatgtgatgctgctgacatccgacgccccagagtataagccctgggctctggtcatccaggattccaacggagagaacaaaatcaaaatgctgtctggcggctcaaaaagaaccgccgacggcagcgaattcgagcccaagaagaagaggaaagtc

SEQ ID NO: 618 - DNA, 5559 bp, synthetic construct
  source 1..5559: mol_type = other DNA
atgaaacggacagccgacggaagcgagttcgagtcaccaaagaagaagcggaaagtctcatcagaaacaggaccagtcgccgtggacccaacactgaggagaaggattgagccccatgaatttgaagtctttttcgaccccagggagctgaggaaggaggcatgcctgctgtacgagatcaagtggggcacaagccacaagatctggcgcaacagcggcaagaacaccacaaagcacgtggaagtgaatttcatcgagaagtttacctccgagcggcacttctgcccctctatcagctgttccatcacatggtttctgtcttggagcccttgctgggagtgttccaaggccatccgcgagttcctgtctcagcaccctaacgtgaccctggtcatctacgtggcccggctgtttcaacacatggaccagcagaacaggcagggcctgcgcgatctggtgaattctggcgtgaccatccagatcatgacagcctcagagtacgaccattgctggcggaacttcgtgaattatccacctggcaaggaggcacactggccaagatacccacccctgtggatgaagctgtatgcactggagctgcacgcaggaatcctgggcctgcctccatgtctgaatatcctgcggagaaagcagccccagctgacatttttcactatcgcactgcagagctgtcattaccagagactgcctcctcatatcctgtgggctacaggccttaaatctggaggatctagcggaggatcctctggcagcgagacaccaggaacaagcgagtcagcaacaccagagagcagtggcggcagcagcggcggcagcgacaagaagtacagcatcggcctggacatcggcaccaactctgtgggctgggccgtgatcaccgacgagtacaaggtgcccagcaagaaattcaaggtgctgggcaacaccgaccggcacagcatcaagaagaacctgatcggagccctgctgttcgacagcggcgaaacagccgaggccacccggctgaagagaaccgccagaagaagatacaccagacggaagaaccggatctgctatctgcaagagatcttcagcaacgagatggccaaggtggacgacagcttcttccacagactggaagagtccttcctggtggaagaggataagaagcacgagcggcaccccatcttcggcaacatcgtggacgaggtggcctaccacgagaagtaccccaccatctaccacctgagaaagaaactggtggacagcaccgacaaggccgacctgcggctgatctatctggccctggcccacatgatcaagttccggggccacttcctgatcgagggcgacctgaaccccgacaacagcgacgtggacaagctgttcatccagctggtgcagacctacaaccagctgttcgaggaaaaccccatcaacgccagcggcgtggacgccaaggccatcctgtctgccagactgagcaagagcagacggctggaaaatctgatcgcccagctgcccggcgagaagaagaatggcctgttcggaaacctgattgccctgagcctgggcctgacccccaacttcaagagcaacttcgacctggccgaggatgccaaactgcagctgagcaaggacacctacgacgacgacctggacaacctgctggcccagatcggcgaccagtacgccgacctgtttctggccgccaagaacctgtccgacgccatcctgctgagcgacatcctgagagtgaacaccgagatcaccaaggcccccctgagcgcctctatgatcaagagatacgacgagcaccaccaggacctgaccctgctgaaagctctcgtgcggcagcagctgcctgagaagtacaaagagattttcttcgaccagagcaagaacggctacgccggctacattgacggcggagccagccaggaagagttctacaagttcatcaagcccatcctggaaaagatggacggcaccgaggaactgctcgtgaagctgaacagagaggacctgctgcggaagcagcggaccttcgacaacggcagcatcccccaccagatccacctgggagagctgcacgccattctgcggcggcaggaagatttttacccattcctgaaggacaaccgggaaaagatcgagaagatcctgaccttccgcatcccctactacgtgggccctctggccaggggaaacagcagattcgcctggatgaccagaaagagcgaggaaaccatcaccccctggaacttcgaggaagtggtggacaagggcgcttccgcccagagcttcatcgagcggatgaccaacttcgataagaacctgcccaacgagaaggtgctgcccaagcacagcctgctgtacgagtacttcaccgtgtataacgagctgaccaaagtgaaatacgtgaccgagggaatgagaaagcccgccttcctgagcggcgagcagaaaaaggccatcgtggacctgctgttcaagaccaaccggaaagtgaccgtgaagcagctgaaagaggactacttcaagaaaatcgagtgcttcgactccgtggaaatctccggcgtggaagatcggttcaacgcctccctgggcacataccacgatctgctgaaaattatcaaggacaaggacttcctggacaatgaggaaaacgaggacattctggaagatatcgtgctgaccctgacactgtttgaggacagagagatgatcgaggaacggctgaaaacctatgcccacctgttcgacgacaaagtgatgaagcagctgaagcggcggagatacaccggctggggcaggctgagccggaagctgatcaacggcatccgggacaagcagtccggcaagacaatcctggatttcctgaagtccgacggcttcgccaacagaaacttcatgcagctgatccacgacgacagcctgacctttaaagaggacatccagaaagcccaggtgtccggccagggcgatagcctgcacgagcacattgccaatctggccggcagccccgccattaagaagggcatcctgcagacagtgaaggtggtggacgagctcgtgaaagtgatgggccggcacaagcccgagaacatcgtgatcgaaatggccagagagaaccagaccacccagaagggacagaagaacagccgcgagagaatgaagcggatcgaagagggcatcaaagagctgggcagccagatcctgaaagaacaccccgtggaaaacacccagctgcagaacgagaagctgtacctgtactacctgcagaatgggcgggatatgtacgtggaccaggaactggacatcaaccggctgtccgactacgatgtggaccatatcgtgcctcagagctttctgaaggacgactccatcgacaacaaggtgctgaccagaagcgacaagaaccggggcaagagcgacaacgtgccctccgaagaggtcgtgaagaagatgaagaactactggcggcagctgctgaacgccaagctgattacccagagaaagttcgacaatctgaccaaggccgagagaggcggcctgagcgaactggataaggccggcttcatcaagagacagctggtggaaacccggcagatcacaaagcacgtggcacagatcctggactcccggatgaacactaagtacgacgagaatgacaagctgatccgggaagtgaaagtgatcaccctgaagtccaagctggtgtccgatttccggaaggatttccagttttacaaagtgcgcgagatcaacaactaccaccacgcccacgacgcctacctgaacgccgtcgtgggaaccgccctgatcaaaaagtaccctaagctggaaagcgagttcgtgtacggcgactacaaggtgtacgacgtgcggaagatgatcgccaagagcgagcaggaaatcggcaaggctaccgccaagtacttcttctacagcaacatcatgaactttttcaagaccgagattaccctggccaacggcgagatccggaagcggcctctgatcgagacaaacggcgaaaccggggagatcgtgtgggataagggccgggattttgccaccgtgcggaaagtgctgagcatgccccaagtgaatatcgtgaaaaagaccgaggtgcagacaggcggcttcagcaaagagtctatcctgcccaagaggaacagcgataagctgatcgccagaaagaaggactgggaccctaagaagtacggcggcttcgacagccccaccgtggcctattctgtgctggtggtggccaaagtggaaaagggcaagtccaagaaactgaagagtgtgaaagagctgctggggatcaccatcatggaaagaagcagcttcgagaagaatcccatcgactttctggaagccaagggctacaaagaagtgaaaaaggacctgatcatcaagctgcctaagtactccctgttcgagctggaaaacggccggaagagaatgctggcctctgccggcgaactgcagaagggaaacgaactggccctgccctccaaatatgtgaacttcctgtacctggccagccactatgagaagctgaagggctcccccgaggataatgagcagaaacagctgtttgtggaacagcacaagcactacctggacgagatcatcgagcagatcagcgagttctccaagagagtgatcctggccgacgctaatctggacaaagtgctgtccgcctacaacaagcaccgggataagcccatcagagagcaggccgagaatatcatccacctgtttaccctgaccaatctgggagcccctgccgccttcaagtactttgacaccaccatcgaccggaagaggtacaccagcaccaaagaggtgctggacgccaccctgatccaccagagcatcaccggcctgtacgagacacggatcgacctgtctcagctgggaggtgacagcggcgggagcggcgggagcggggggagcactaatctgagcgacatcattgagaaggagactgggaaacagctggtcattcaggagtccatcctgatgctgcctgaggaggtggaggaagtgatcggcaacaagccagagtctgacatcctggtgcacaccgcctacgacgagtccacagatgagaatgtgatgctgctgacctctgacgcccccgagtataagccttgggccctggtcatccaggattctaacggcgagaataagatcaagatgctgagcggaggatccggaggatctggaggcagcaccaacctgtctgacatcatcgagaaggagacaggcaagcagctggtcatccaggagagcatcctgatgctgcccgaagaagtcgaagaagtgatcggaaacaagcctgagagcgatatcctggtccataccgcctacgacgagagtaccgacgaaaatgtgatgctgctgacatccgacgccccagagtataagccctgggctctggtcatccaggattccaacggagagaacaaaatcaaaatgctgtctggcggctcaaaaagaaccgccgacggcagcgaattcgagcccaagaagaagaggaaagtc

SEQ ID NO: 619 - protein, 228 aa, synthetic construct
SSETGPVAVDPTLRRRIEPHEFEVFFDPRELRKETCLLYEINWGGRHSIWRHTSQNTNKHVEVNFIEKFTTERYFCPNTRCSITWFLSWSPCGECSRAITEFLSRYPHVTLFIYIARLYHHADPRNRQGLRDLISSGVTIQIMTEQESGYCWRNFVNYSPSNEAHWPRYPHLWVRLYVLELYCIILGLPPCLNILRRKQPQLTFFTIALQSCHYQRLPPHILWATGLK

SEQ ID NO: 620 - protein, 228 aa, synthetic construct
SSETGPVAVDPTLRRRIEPEFFNRNYDPRELRKETYLLYEIKWGKESKIWRHTSNNRTQHAEVNFLENFFNELYFNPSTHCSITWFLSWSPCGECSKAIVEFLKEHPNVNLEIYVARLYLCEDERNRQGLRDLVNSGVTIRIMNLPDYNYCWRTFVSHQGGDEDYWPRHFAPWVRLYVLELYCIILGLPPCLNILRRKQPQLTFFTIALQSCHYQRLPPHILWATGLK

SEQ ID NO: 621 - protein, 384 aa, synthetic construct
MKPHFRNTVERMYRDTFSYNFYNRPILSRRNTVWLCYEVKTKGPSRPPLDAKIFRGQVYSELKYHPEMRFFHWFSKWRKLHRDQEYEVTWYISWSPCTKCTRDMATFLAEDPKVTLTIFVARLYYFWDPDYQEALRSLCQKRDGPRATMKIMNYDEFQHCWSKFVYSQRELFEPWNNLPKYYILLHIMLGEILRHSMDPPTFTFNFNNEPWVRGRHETYLCYEVERMHNDTWVLLNQRRGFLCNQAPHKHGFLEGRHAELCFLDVIPFWKLDLDQDYRVTCFTSWSPCFSCAQEMAKFISKNKHVSLCIFTARIYRRQGRCQEGLRTLAEAGAKISIMTYSEFKHCWDTFVDHQGCPFQPWDGLDEHSQDLSGRLRAILQNQEN

SEQ ID NO: 622 - protein, 184 aa, synthetic construct
MDPPTFTFNFNNEPWVRGRHETYLCYEVERMHNDTWVLLNQRRGFLCNQAPHKHGFLEGRHAELCFLDVIPFWKLDLDQDYRVTCFTSWSPCFSCAQEMAKFISKNKHVSLCIFTARIYDDQGRCQEGLRTLAEAGAKISIMTYSEFKHCWDTFVDHQGCPFQPWDGLDEHSQDLSGRLRAILQ

SEQ ID NO: 623 - protein, 184 aa, synthetic construct
MDPPTFTFNFNNEPWVRGRHETYLCYEVERMHNDTWVLLNQRRGFLCNQAPHKHGFLEGRHAELCFLDVIPFWKLDLDQDYRVTCFTSWSPCFSCAQEMAKFISKNKHVSLCIFTARIYRRQGRCQEGLRTLAEAGAKISIMTYSEFKHCWDTFVDHQGCPFQPWDGLDEHSQDLSGRLRAILQ

SEQ ID NO: 624 - protein, 428 aa, Mus sp.
MGPFCLGCSHRKCYSPIRNLISQETFKFHFKNLGYAKGRKDTFLCYEVYRKOCOSPVSLHHGVFKNKONIHAEICFLYWFHDKVLKVLSPREEFKITWYMSWSPCFECAEQIVRFLATHHNLSLDIFSSRLYNVQDPETQQNLCRLVQEGAQVAAMDLYEFKKCWKKFVDNGGRRFRPWKRLLTNFRYQDSKLQEILRPCYIPVPSSSSSTLSNICLTKGLPETRFCVEGRRMDPLSEEEFYSQFYNQRVKHLCYYHRMKPYLCYQLEQFNGQAPLKGCLLSEKGKQHAEILFLDKIRSMELSQVTITCYLTWSPCPNCAWQLAAFKRORPOULHIATSRLYFHWKRPFQKGLCSLWQSGILVDVMDLPQFTDCWTNFVNPKRPFWPWKGLEIISRRTQRRLRRIKESWGLQDLVNDFGNLQLGPPMS

SEQ ID NO: 625 - protein, 429 aa, Rattus sp.
MGPFCLGCSHRKCYSPIRNLISQETFKFHFKNLRYAIDRKDTFLCYEVTRKDCDSPVSLHHGVFKNKDNIHAEICFLYWFHDKVLKVLSPREEFKITWYMSWSPCFECAEQVLRFLATHHNLSLDIFSSRLYNIRDPENQQNLCRLVQEGAQVAAMDLYEFKKCWKKFVDNGGRRFRPWKKLLTNFRYQDSKLQEILRPCYIPVPSSSSSTLSNICLTKGLPETRFCVERRRVHLLSEEEFYSQFYNQRVKHLCYYHGVKPYLCYQLEQFNGQAPLKGCLLSEKGKQHAEILFLDKIRSMELSQVIITCYLTWSPCPNCAWQLAAFKRDRPDLILHIYTSRLYFHWKRPFQKGLCSLWQSGILVDVMDLPQFTDCWTNFVNPKRPFWPWKGLEIISRRTQRRLHRIKESWGLQDLVNDFGNLQLGPPMS

SEQ ID NO: 626 - protein, 370 aa, Macaca mulatta; identical to SEQ ID NO: 33

SEQ ID NO: 627 - protein, 384 aa, Pan troglodytes; identical to SEQ ID NO: 34

SEQ ID NO: 628 - protein, 377 aa, Chlorocebus sabaeus; identical to SEQ ID NO: 35

SEQ ID NO: 629 - protein, 384 aa, Homo sapiens; identical to SEQ ID NO: 36

SEQ ID NO: 630 - protein, 373 aa, Homo sapiens; identical to SEQ ID NO: 32

SEQ ID NO: 631 - protein, 382 aa, Homo sapiens; identical to SEQ ID NO: 37

SEQ ID NO: 632 - protein, 396 aa, Rattus sp.
MQPQGLGPNAGMGPVCLGCSHRRPYSPIRNPLKKLYQQTFYFHFKNVRYAWGRKNNFLCYEVNGMDCALPVPLRQGVFRKQGHIHAELCFIYWFHDKVLRVLSPMEEFKVTWYMSWSPCSKCAEQVARFLAAHRNLSLAIFSSRLYYYLRNPNYQQKLCRLIQEGVHVAAMDLPEFKKCWNKFVDNDGQPFRPWMRLRINFSFYDCKLQEIFSRMNLLREDVFYLQFNNSHRVKPVQNRYYRRKSYLCYQLERANGQEPLKGYLLYKKGEQHVEILFLEKMRSMELSQVRITCYLTWSPCPNCARQLAAFKKDHPDLILRIYTSRLYFYWRKKFQKGLCTLWRSGIHVDVMDLPQFADCWTNFVNPQRPFRPWNELEKNSWRIQRRLRRIKESWGL

SEQ ID NO: 633 - protein, 227 aa, Bos sp.
DGWEVAFRSGTVLKAGVLGVSMTEGWAGSGHPGQGACVWTPGTRNTMNLLREVLFKQQFGNQPRVPAPYYRRKTYLCYQLKQRNDLTLDRGCFRNKKQRHAEIRFIDKINSLDLNPSQSYKIICYITWSPCPNCANELVNFITRNNHLKLEIFASRLYFHWIKSFKMGLQDLQNAGISVAVMTHTEFEDCWEQFVDNQSRPFQPWDKLEQYSASIRRRLQRILTAPI

SEQ ID NO: 634 - protein, 490 aa, Pan troglodytes; identical to SEQ ID NO: 40

SEQ ID NO: 635 - protein, 190 aa, Gorilla sp.
MNPQIRNPMKAMYPGTFYFQFKNLWEANDRNETWLCFTVEGIKRRSVVSWKTGVFRNQVDSETHCHAERCFLSWFCDDILSPNTNYQVTWYTSWSPCPECAGEVAEFLARHSNVNLTIFTARLYYFQDTDYQEGLRSLSQEGVAVKIMDYKDFKYCWENFVYNDDEPFKPWKGLKYNFRFLKRRLQEILE

SEQ ID NO: 636 - protein, 199 aa, Homo sapiens
MEASPASGPRHLMDPHIFTSNFNNGIGRHKTYLCYEVERLDNGTSVKMOQHRGEEHNQAKNEECGEAGRHAELRFLDLVPSLQLDPAQIYRVTWFISWSPCFSWGCAGEVRAFLQENTHVRLRIFAARIYDYDPLYKEALQMLRDAGAQVSIMTYDEFKHCWDTFVDHQGCPFQPWDGLDEHSQALSGRLRAILQNQGN

SEQ ID NO: 637 - protein, 202 aa, Macaca mulatta
MDGSPASRPRHLMDPNTFTFNFNNDLSVRGRHQTYLCYEVERLDNGTWVPMDERRGEECNKAKNNPCGOAGCHVELRFLCEVPSWQLDPAQTYRVTWFISWSPCERRGCAGQVRVFLQENKHVRLRIFAARIYDYDPLYQEALRTLRDAGAQVSIMTYEEFKHCWDTFVDRQGRPFQPWDGLDEHSQALSGRLRAILQNQGN

SEQ ID NO: 638 - protein, 184 aa, Bos sp.
MDEYTFTENFNNQGWPSKTYLCYEMERLDGDATIPLDEYKGFVRNKGLDQPEKPCAELYFLGKIHSWNLDRNQHYRLTCFISWSPCAOCAQKEEEEEKENHHISUIIEASRIAEHNRFGCHQSGLCELQAAGARITIMTFEDFKHCWETFVDHKGKPFQPWEGLNVKSQALCTELQAILKTQQN

SEQ ID NO: 639 - protein, 201 aa, Homo sapiens
MALLTAETFRLQFNNKRRLRRPYYPRKALLCYQLTPQNGSTPTRGYFENKKKCHAEICFINEIKSMGLDETQCYQVTCYLTYVSPCSSCAWEENOEIKAHOHENEGIEASRLYYHWCKPQQKGLRLLCGSQVPVEVMGFPKFADCWENFVDHEKPLSFNPYKMLEELDKNSRAIKRRLERIKIPGVRAQGRYMDILCDAEV

SEQ ID NO: 640 - protein, 380 aa, Homo sapiens
MNPQIRNPMERMYRDTFYDNFENEPILYGRSYTWLCYEVKIKRGRSNEEWDEGNERGPNEPKRQSNHRQENYERFENHAEMCFLSWFCGNRLPANRRFQITWFVSWPCLPCVVKVTKFLAEHPNVTLTISAARLYYYRDRDWRWVLLRLHKAGARVKIMDYEDFAYCWENFVCNEGQPFMPWYKFDDNYASLHRTLKEILRNPMEAMYPHIFYFHFKNLLKACGRNESWLCFTMEVTKHHSAVFRKRGVFRNQVDPETHCAEPCFLSWFCDDLSPIYPVFEMMWSPCPECAGEVAEFLARHSNVNLTIFTARLCYFWDTDYQEGLCSLSQEGASVKIMGYKDFVSCWKNFVYSDDEPFKPWKGLQTNFRLLKRRLREILQ

SEQ ID NO: 641 - protein, 228 aa, Rattus sp.
SSETGPVAVDPTLRRRIEPHEFEVFFDPRELRKETCLLYEINWGGRHSIWRHTSQNTNKHVEVNFIEKFTTERYFCPNTRCSRRWFLSWSPCGECSRAITEFLSRYPHVTLFIYIARLYHHADPRNRQGLRDLISSGVTIQIMTEQESGYCWRNFVNYSPSNEAHWPRYPHLWVRLYVLELYCIILGLPPCLNILRRKQPQLTFFTIALQSCHYQRLPPHILWATGLK

SEQ ID NO: 642 - protein, 228 aa, synthetic construct
SSETGPVAVDPTLRRRIEPHEFEVFFDPRELRKETCLLYEIKWGTSHKIWRHSSKNTTKHVEVNFIEKFTSERHFCPSTSCSITWFLSWSPCGECSKAITEFLSQHPNVTLVIYVARLYHHMDQQNRQGLRDLVNSGVTIQIMTAPEYDYCWRNFVNYPPGKEAHWPRYPPLWMKLYALELHAGILGLPPCLNILRRKQPQLTFFTIALQSCHYQRLPPHILWATGLK

SEQ ID NO: 643 - protein, 228 aa, synthetic construct
SSETGPVAVDPTLRRRIEPHEFEVFFDPRELRKEACLLYEIKWGTSHKIWRNSGKNTTKHVEVNFIEKFTSERHFCPSISCSITWFLSWSPCWECSKAIREFLSQHPNVTLVIYVARLFQHMDQQNRQGLRDLVNSGVTIQIMTASEYDHCWRNFVNYPPGKEAHWPRYPPLWMKLYALELHAGILGLPPCLNILRRKQPQLTFFTIALQSCHYQRLPPHILWATGLK

SEQ ID NO: 644 - protein, 228 aa, synthetic construct
SSETGPVAVDPTLRRRIEPEFFNRNYDPRELRKETYLLYEIKWGKESKIWRHTSNNRTQHAEVNFLENFFNELYFNPSTHCSRRWFLSWSPCGECSKAIVEFLKEHPNVNLEIYVARLYLCEDERNRQGLRDLVNSGVTIRIMNLPDYNYCWRTFVSHQGGDEDYWPRHFAPWVRLYVLELYCIILGLPPCLNILRRKQPQLTFFTIALQSCHYQRLPPHILWATGLK

SEQ ID NO: 645 - protein, 228 aa, synthetic construct
SSETGPVAVDPTLRRRIEPFYFQFNNDPRACRRKTYLCYELKQDGSTWVWKRTLHNKGRHAEICFLEKISSLEKLDPAQHYRITWYMSWSPCSNCAQKIVDFLKEHPHVNLRIYVARLYYHEEERYQEGLRNLRRSGVSIRVMDLPDFEHCWETFVDNGGGPFQPWPGLEELNSKQLSRRLQAGILGLPPCLNILRRKQPQLTFFTIALQSCHYQRLPPHILWATGLK

SEQ ID NO: 646 - protein, 228 aa, synthetic construct
SSETGPVAVDPTLRRRIEPFHFQFNNDPRAYRRKTYLCYELKQDGSTWVLDRTLRNKGRHAEICFLDKINSWERLDPAQHYRVTWYMSWSPCSNCAQQVVDFLKEHPHVNLRIFAARLYYHEQRRYQEGLRSLRGSGVPVAVMTLPDFEHCWETFVDHGGRPFQPWDGLEELNSRSLSRRLQAGILGLPPCLNILRRKQPQLTFFTIALQSCHYQRLPPHILWATGLK

SEQ ID NO: 647 - RNA, 100 nt, synthetic construct; identical to SEQ ID NO: 461
  source 1..100: mol_type = other RNA

SEQ ID NO: 648 - RNA, 109 nt, synthetic construct
  source 1..109: mol_type = other RNA
cacactggcatcagagaaccagttttagtactctgtaatgaaaattacagaatctactaaaacaaggcaaaatgccgtgtttatctcgtcaacttgttggcgagatttt

SEQ ID NO: 649 - RNA, 100 nt, synthetic construct
  source 1..100: mol_type = other RNA
ggcatcagagaaccacagaagttttagagctagaaatagcaagttaaaataaggctagtccgttatcaacttgaaaaagtggcaccgagtcggtgctttt

SEQ ID NO: 650 - RNA, 100 nt, synthetic construct
  source 1..100: mol_type = other RNA
tgacaccacactggcatcaggttttagagctagaaatagcaagttaaaataaggctagtccgttatcaacttgaaaaagtggcaccgagtcggtgctttt

SEQ ID NO: 651 - RNA, 100 nt, synthetic construct
  source 1..100: mol_type = other RNA
tactgccgtaaccctgatgggttttagagctagaaatagcaagttaaaataaggctagtccgttatcaacttgaaaaagtggcaccgagtcggtgctttt

SEQ ID NO: 652 - RNA, 100 nt, synthetic construct; identical to SEQ ID NO: 651
  source 1..100: mol_type = other RNA

SEQ ID NO: 653 - RNA, 100 nt, synthetic construct; identical to SEQ ID NO: 651
  source 1..100: mol_type = other RNA

SEQ ID NO: 654 - RNA, 109 nt, synthetic construct
  source 1..109: mol_type = other RNA
tgccgtaaccctgatggtgacgttttagtactctgtaatgaaaattacagaatctactaaaacaaggcaaaatgccgtgtttatctcgtcaacttgttggcgagatttt

SEQ ID NO: 655 - RNA, 100 nt, synthetic construct
  source 1..100: mol_type = other RNA
agtactgccgtaaccctgatgttttagagctagaaatagcaagttaaaataaggctagtccgttatcaacttgaaaaagtggcaccgagtcggtgctttt

SEQ ID NO: 656 - RNA, 100 nt, synthetic construct
  source 1..100: mol_type = other RNA
actgccgtaaccctgatggtgttttagagctagaaatagcaagttaaaataaggctagtccgttatcaacttgaaaaagtggcaccgagtcggtgctttt

SEQ ID NO: 657 - RNA, 100 nt, synthetic construct
  source 1..100: mol_type = other RNA
cagtactgccgtaaccctgagttttagagctagaaatagcaagttaaaataaggctagtccgttatcaacttgaaaaagtggcaccgagtcggtgctttt

SEQ ID NO: 658 - RNA, 100 nt, synthetic construct
  source 1..100: mol_type = other RNA
tttcagtactgccgtaacccgttttagagctagaaatagcaagttaaaataaggctagtccgttatcaacttgaaaaagtggcaccgagtcggtgctttt

SEQ ID NO: 659 - RNA, 100 nt, synthetic construct
  source 1..100: mol_type = other RNA
ggctccttccgaacaaggtagttttagagctagaaatagcaagttaaaataaggctagtccgttatcaacttgaaaaagtggcaccgagtcggtgctttt

SEQ ID NO: 660 - RNA, 100 nt, synthetic construct; identical to SEQ ID NO: 659
  source 1..100: mol_type = other RNA

SEQ ID NO: 661 - RNA, 100 nt, synthetic construct; identical to SEQ ID NO: 659
  source 1..100: mol_type = other RNA

SEQ ID NO: 662 - RNA, 100 nt, synthetic construct; identical to SEQ ID NO: 659
  source 1..100: mol_type = other RNA

SEQ ID NO: 663 - RNA, 100 nt, synthetic construct; identical to SEQ ID NO: 659
  source 1..100: mol_type = other RNA

SEQ ID NO: 664 - RNA, 100 nt, synthetic construct; identical to SEQ ID NO: 659
  source 1..100: mol_type = other RNA

SEQ ID NO: 665 - RNA, 100 nt, synthetic construct
  source 1..100: mol_type = other RNA
gctccttccgaacaaggtaagttttagagctagaaatagcaagttaaaataaggctagtccgttatcaacttgaaaaagtggcaccgagtcggtgctttt

SEQ ID NO: 666 - RNA, 100 nt, synthetic construct; identical to SEQ ID NO: 665
  source 1..100: mol_type = other RNA

SEQ ID NO: 667 - RNA, 100 nt, synthetic construct; identical to SEQ ID NO: 665
  source 1..100: mol_type = other RNA

SEQ ID NO: 668 - RNA, 100 nt, synthetic construct; identical to SEQ ID NO: 665
  source 1..100: mol_type = other RNA

SEQ ID NO: 669 - RNA, 100 nt, synthetic construct; identical to SEQ ID NO: 665
  source 1..100: mol_type = other RNA

SEQ ID NO: 670 - RNA, 100 nt, synthetic construct; identical to SEQ ID NO: 665
  source 1..100: mol_type = other RNA

SEQ ID NO: 671 - RNA, 109 nt, synthetic construct
  source 1..109: mol_type = other RNA
aggctccttccgaacaaggtagttttagtactctgtaatgaaaattacagaatctactaaaacaaggcaaaatgccgtgtttatctcgtcaacttgttggcgagatttt

SEQ ID NO: 672 - RNA, 109 nt, synthetic construct; identical to SEQ ID NO: 671
  source 1..109: mol_type = other RNA

SEQ ID NO: 673 - RNA, 100 nt, synthetic construct
  source 1..100: mol_type = other RNA
ctagaggctccttccgaacagttttagagctagaaatagcaagttaaaataaggctagtccgttatcaacttgaaaaagtggcaccgagtcggtgctttt

SEQ ID NO: 674 - RNA, 100 nt, synthetic construct; identical to SEQ ID NO: 673
  source 1..100: mol_type = other RNA

SEQ ID NO: 675 - RNA, 100 nt, synthetic construct
  source 1..100: mol_type = other RNA
tagaggctccttccgaacaagttttagagctagaaatagcaagttaaaataaggctagtccgttatcaacttgaaaaagtggcaccgagtcggtgctttt

SEQ ID NO: 676 - RNA, 100 nt, synthetic construct
  source 1..100: mol_type = other RNA
ccaagcctagaggctccttcgttttagagctagaaatagcaagttaaaataaggctagtccgttatcaacttgaaaaagtggcaccgagtcggtgctttt

SEQ ID NO: 677 - RNA, 100 nt, synthetic construct
  source 1..100: mol_type = other RNA
tccacggctgtttctgaacagttttagagctagaaatagcaagttaaaataaggctagtccgttatcaacttgaaaaagtggcaccgagtcggtgctttt

SEQ ID NO: 678 - RNA, 100 nt, synthetic construct; identical to SEQ ID NO: 677
  source 1..100: mol_type = other RNA

SEQ ID NO: 679 - RNA, 100 nt, synthetic construct; identical to SEQ ID NO: 677
  source 1..100: mol_type = other RNA

SEQ ID NO: 680 - RNA, 109 nt, synthetic construct
  source 1..109: mol_type = other RNA
acgtccacggctgtttctgaagttttagtactctgtaatgaaaattacagaatctactaaaacaaggcaaaatgccgtgtttatctcgtcaacttgttggcgagatttt

SEQ ID NO: 681 - RNA, 100 nt, synthetic construct
  source 1..100: mol_type = other RNA
ccacggctgtttctgaacaagttttagagctagaaatagcaagttaaaataaggctagtccgttatcaacttgaaaaagtggcaccgagtcggtgctttt

SEQ ID NO: 682 - RNA, 100 nt, synthetic construct
  source 1..100: mol_type = other RNA
gacgtccacggctgtttctggttttagagctagaaatagcaagttaaaataaggctagtccgttatcaacttgaaaaagtggcaccgagtcggtgctttt

SEQ ID NO: 683 - RNA, 100 nt, synthetic construct
  source 1..100: mol_type = other RNA
gcgacgtccacggctgtttcgttttagagctagaaatagcaagttaaaataaggctagtccgttatcaacttgaaaaagtggcaccgagtcggtgctttt

SEQ ID NO: 684 - RNA, 100 nt, synthetic construct
  source 1..100: mol_type = other RNA
tactcatttgggtagttttcgttttagagctagaaatagcaagttaaaataaggctagtccgttatcaacttgaaaaagtggcaccgagtcggtgctttt

SEQ ID NO: 685 - RNA, 100 nt, synthetic construct; identical to SEQ ID NO: 684
  source 1..100: mol_type = other RNA

SEQ ID NO: 686 - RNA, 100 nt, synthetic construct; identical to SEQ ID NO: 684
  source 1..100: mol_type = other RNA

SEQ ID NO: 687 - RNA, 100 nt, synthetic construct
  source 1..100: mol_type = other RNA
actcatttgggtagttttctgttttagagctagaaatagcaagttaaaataaggctagtccgttatcaacttgaaaaagtggcaccgagtcggtgctttt

SEQ ID NO: 688 - RNA, 100 nt, synthetic construct; identical to SEQ ID NO: 687
  source 1..100: mol_type = other RNA

SEQ ID NO: 689 - RNA, 100 nt, synthetic construct; identical to SEQ ID NO: 687
  source 1..100: mol_type = other RNA

SEQ ID NO: 690 - RNA, 100 nt, synthetic construct
  source 1..100: mol_type = other RNA
ctcatttgggtagttttctggttttagagctagaaatagcaagttaaaataaggctagtccgttatcaacttgaaaaagtggcaccgagtcggtgctttt

SEQ ID NO: 691 - RNA, 100 nt, synthetic construct; identical to SEQ ID NO: 690
  source 1..100: mol_type = other RNA

SEQ ID NO: 692 - RNA, 100 nt, synthetic construct; identical to SEQ ID NO: 690
  source 1..100: mol_type = other RNA

SEQ ID NO: 693 - RNA, 109 nt, synthetic construct
  source 1..109: mol_type = other RNA
atactcatttgggtagttttcgttttagtactctgtaatgaaaattacagaatctactaaaacaaggcaaaatgccgtgtttatctcgtcaacttgttggcgagatttt

SEQ ID NO: 694 - RNA, 100 nt, synthetic construct
  source 1..100: mol_type = other RNA
tcatttgggtagttttctgggttttagagctagaaatagcaagttaaaataaggctagtccgttatcaacttgaaaaagtggcaccgagtcggtgctttt

SEQ ID NO: 695 - RNA, 100 nt, synthetic construct
  source 1..100: mol_type = other RNA
agtaacagtggttgccttctgttttagagctagaaatagcaagttaaaataaggctagtccgttatcaacttgaaaaagtggcaccgagtcggtgctttt

SEQ ID NO: 696 - RNA, 100 nt, synthetic construct; identical to SEQ ID NO: 695
  source 1..100: mol_type = other RNA

SEQ ID NO: 697 - RNA, 100 nt, synthetic construct; identical to SEQ ID NO: 695
  source 1..100: mol_type = other RNA

SEQ ID NO: 698 - RNA, 100 nt, synthetic construct; identical to SEQ ID NO: 695
  source 1..100: mol_type = other RNA

SEQ ID NO: 699 - RNA, 100 nt, synthetic construct
  source 1..100: mol_type = other RNA
ctgcgtctgagcattgcgtcgttttagagctagaaatagcaagttaaaataaggctagtccgttatcaacttgaaaaagtggcaccgagtcggtgctttt

SEQ ID NO: 700 - RNA, 100 nt, synthetic construct; identical to SEQ ID NO: 699
  source 1..100: mol_type = other RNA

SEQ ID NO: 701 - RNA, 100 nt, synthetic construct; identical to SEQ ID NO: 699
  source 1..100: mol_type = other RNA

SEQ ID NO: 702 - RNA, 109 nt, synthetic construct
  source 1..109: mol_type = other RNA
cttctgcgtctgagcattgcggttttagtactctgtaatgaaaattacagaatctactaaaacaaggcaaaatgccgtgtttatctcgtcaacttgttggcgagatttt

SEQ ID NO: 703 - RNA, 100 nt, synthetic construct
  source 1..100: mol_type = other RNA
ccttctgcgtctgagcattggttttagagctagaaatagcaagttaaaataaggctagtccgttatcaacttgaaaaagtggcaccgagtcggtgctttt

SEQ ID NO: 704 - RNA, 109 nt, synthetic construct
  source 1..109: mol_type = other RNA
atgtgcctcggtaactctgtcgttttagtactctgtaatgaaaattacagaatctactaaaacaaggcaaaatgccgtgtttatctcgtcaacttgttggcgagatttt

SEQ ID NO: 705 - RNA, 109 nt, synthetic construct
  source 1..109: mol_type = other RNA
tgcctcggtaactctgtccatgttttagtactctgtaatgaaaattacagaatctactaaaacaaggcaaaatgccgtgtttatctcgtcaacttgttggcgagatttt

SEQ ID NO: 706 - RNA, 109 nt, synthetic construct
  source 1..109: mol_type = other RNA
ctcggtaactctgtccataatgttttagtactctgtaatgaaaattacagaatctactaaaacaaggcaaaatgccgtgtttatctcgtcaacttgttggcgagatttt

SEQ ID NO: 707 - RNA, 100 nt, synthetic construct
  source 1..100: mol_type = other RNA
ctcggtaactctgtccataagttttagagctagaaatagcaagttaaaataaggctagtccgttatcaacttgaaaaagtggcaccgagtcggtgctttt

SEQ ID NO: 708 - RNA, 100 nt, synthetic construct
  source 1..100: mol_type = other RNA
ggtaatggccagagttatcggttttagagctagaaatagcaagttaaaataaggctagtccgttatcaacttgaaaaagtggcaccgagtcggtgctttt

SEQ ID NO: 709 - RNA, 100 nt, synthetic construct
  source 1..100: mol_type = other RNA
gtaatggccagagttatcgagttttagagctagaaatagcaagttaaaataaggctagtccgttatcaacttgaaaaagtggcaccgagtcggtgctttt

SEQ ID NO: 710 - RNA, 100 nt, synthetic construct
  source 1..100: mol_type = other RNA
aatggccagagttatcgagggttttagagctagaaatagcaagttaaaataaggctagtccgttatcaacttgaaaaagtggcaccgagtcggtgctttt

SEQ ID NO: 711 - RNA, 100 nt, synthetic construct
  source 1..100: mol_type = other RNA
atggtaatggccagagttatgttttagagctagaaatagcaagttaaaataaggctagtccgttatcaacttgaaaaagtggcaccgagtcggtgctttt

SEQ ID NO: 712 - RNA, 100 nt, synthetic construct
  source 1..100: mol_type = other RNA
cgtccctccgaatgttattcgttttagagctagaaatagcaagttaaaataaggctagtccgttatcaacttgaaaaagtggcaccgagtcggtgctttt

SEQ ID NO: 713 - RNA, 100 nt, synthetic construct; identical to SEQ ID NO: 712
  source 1..100: mol_type = other RNA

SEQ ID NO: 714 - RNA, 100 nt, synthetic construct; identical to SEQ ID NO: 712
  source 1..100: mol_type = other RNA

SEQ ID NO: 715 - RNA, 100 nt, synthetic construct
  source 1..100: mol_type = other RNA
gtccctccgaatgttattctgttttagagctagaaatagcaagttaaaataaggctagtccgttatcaacttgaaaaagtggcaccgagtcggtgctttt

SEQ ID NO: 716 - RNA, 100 nt, synthetic construct; identical to SEQ ID NO: 715
  source 1..100: mol_type = other RNA

SEQ ID NO: 717 - RNA, 100 nt, synthetic construct; identical to SEQ ID NO: 715
  source 1..100: mol_type = other RNA

SEQ ID NO: 718 - RNA, 100 nt, synthetic construct
  source 1..100: mol_type = other RNA
gtgatggacagagttatcgagttttagagctagaaatagcaagttaaaataaggctagtccgttatcaacttgaaaaagtggcaccgagtcggtgctttt

SEQ ID NO: 719 - RNA, 100 nt, synthetic construct
  source 1..100: mol_type = other RNA
tggacagagttatcgaggcagttttagagctagaaatagcaagttaaaataaggctagtccgttatcaacttgaaaaagtggcaccgagtcggtgctttt

SEQ ID NO: 720 - RNA, 100 nt, synthetic construct
  source 1..100: mol_type = other RNA
ggtgatggacagagttatcggttttagagctagaaatagcaagttaaaataaggctagtccgttatcaacttgaaaaagtggcaccgagtcggtgctttt

SEQ ID NO: 721 - RNA, 100 nt, synthetic construct
  source 1..100: mol_type = other RNA
gaggtgatggacagagttatgttttagagctagaaatagcaagttaaaataaggctagtccgttatcaacttgaaaaagtggcaccgagtcggtgctttt

SEQ ID NO: 722 - RNA, 100 nt, synthetic construct
  source 1..100: mol_type = other RNA
acacactttctgggcactgcgttttagagctagaaatagcaagttaaaataaggctagtccgttatcaacttgaaaaagtggcaccgagtcggtgctttt

SEQ ID NO: 723 - RNA, 100 nt, synthetic construct; identical to SEQ ID NO: 722
  source 1..100: mol_type = other RNA

SEQ ID NO: 724 - RNA, 100 nt, synthetic construct; identical to SEQ ID NO: 722
  source 1..100: mol_type = other RNA

SEQ ID NO: 725 - RNA, 100 nt, synthetic construct
  source 1..100: mol_type = other RNA
gggacacactttctgggcacgttttagagctagaaatagcaagttaaaataaggctagtccgttatcaacttgaaaaagtggcaccgagtcggtgctttt

SEQ ID NO: 726 - RNA, 100 nt, synthetic construct; identical to SEQ ID NO: 725
  source 1..100: mol_type = other RNA

SEQ ID NO: 727 - RNA, 100 nt, synthetic construct; identical to SEQ ID NO: 725
  source 1..100: mol_type = other RNA

SEQ ID NO: 728 - RNA, 100 nt, synthetic construct; identical to SEQ ID NO: 725
  source 1..100: mol_type = other RNA

SEQ ID NO: 729 - RNA, 100 nt, synthetic construct
  source 1..100: mol_type = other RNA
gggattgggacacactttctgttttagagctagaaatagcaagttaaaataaggctagtccgttatcaacttgaaaaagtggcaccgagtcggtgctttt

SEQ ID NO: 730 - RNA, 100 nt, synthetic construct
  source 1..100: mol_type = other RNA
ggattgggacacactttctggttttagagctagaaatagcaagttaaaataaggctagtccgttatcaacttgaaaaagtggcaccgagtcggtgctttt

SEQ ID NO: 731 - RNA, 100 nt, synthetic construct
  source 1..100: mol_type = other RNA
attgggacacactttctggggttttagagctagaaatagcaagttaaaataaggctagtccgttatcaacttgaaaaagtggcaccgagtcggtgctttt

SEQ ID NO: 732 - RNA, 100 nt, synthetic construct
  source 1..100: mol_type = other RNA
tgggattgggacacactttcgttttagagctagaaatagcaagttaaaataaggctagtccgttatcaacttgaaaaagtggcaccgagtcggtgctttt

SEQ ID NO: 733 - RNA, 100 nt, synthetic construct
  source 1..100: mol_type = other RNA
atgcctcgccctgcttcggcgttttagagctagaaatagcaagttaaaataaggctagtccgttatcaacttgaaaaagtggcaccgagtcggtgctttt

SEQ ID NO: 734 - RNA, 100 nt, synthetic construct; identical to SEQ ID NO: 733
  source 1..100: mol_type = other RNA

SEQ ID NO: 735 - RNA, 100 nt, synthetic construct; identical to SEQ ID NO: 733
  source 1..100: mol_type = other RNA

SEQ ID NO: 736 - RNA, 100 nt, synthetic construct
  source 1..100: mol_type = other RNA
tgcctcgccctgcttcggctgttttagagctagaaatagcaagttaaaataaggctagtccgttatcaacttgaaaaagtggcaccgagtcggtgctttt

SEQ ID NO: 737 - RNA, 100 nt, synthetic construct; identical to SEQ ID NO: 736
  source 1..100: mol_type = other RNA

SEQ ID NO: 738 - RNA, 100 nt, synthetic construct
  source 1..100: mol_type = other RNA
cctcgccctgcttcggctgggttttagagctagaaatagcaagttaaaataaggctagtccgttatcaacttgaaaaagtggcaccgagtcggtgctttt

SEQ ID NO: 739 - RNA, 100 nt, synthetic construct; identical to SEQ ID NO: 738
  source 1..100: mol_type = other RNA

SEQ ID NO: 740 - RNA, 100 nt, synthetic construct; identical to SEQ ID NO: 738
  source 1..100: mol_type = other RNA

SEQ ID NO: 741 - RNA, 109 nt, synthetic construct
  source 1..109: mol_type = other RNA
ctcgccctgcttcggctggcggttttagtactctgtaatgaaaattacagaatctactaaaacaaggcaaaatgccgtgtttatctcgtcaacttgttggcgagatttt

SEQ ID NO: 742 - RNA, 100 nt, synthetic construct
  source 1..100: mol_type = other RNA
tcgccctgcttcggctggcggttttagagctagaaatagcaagttaaaataaggctagtccgttatcaacttgaaaaagtggcaccgagtcggtgctttt

SEQ ID NO: 743 - RNA, 100 nt, synthetic construct
  source 1..100: mol_type = other RNA
ggcaatgcctcgccctgcttgttttagagctagaaatagcaagttaaaataaggctagtccgttatcaacttgaaaaagtggcaccgagtcggtgctttt

SEQ ID NO: 744 - RNA, 100 nt, synthetic construct
  source 1..100: mol_type = other RNA
ggtcactcccacccgaatacgttttagagctagaaatagcaagttaaaataaggctagtccgttatcaacttgaaaaagtggcaccgagtcggtgctttt

SEQ ID NO: 745 - RNA, 100 nt, synthetic construct; identical to SEQ ID NO: 744
  source 1..100: mol_type = other RNA

SEQ ID NO: 746 - RNA, 100 nt, synthetic construct
  source 1..100: mol_type = other RNA
tcgggtcactcccacccgaagttttagagctagaaatagcaagttaaaataaggctagtccgttatcaacttgaaaaagtggcaccgagtcggtgctttt

SEQ ID NO: 747 - RNA, 100 nt, synthetic construct
  source 1..100: mol_type = other RNA
aaaatcgggtcactcccaccgttttagagctagaaatagcaagttaaaataaggctagtccgttatcaacttgaaaaagtggcaccgagtcggtgctttt

SEQ ID NO: 748 - RNA, 100 nt, synthetic construct
  source 1..100: mol_type = other RNA
tggatttcggcagtagttctgttttagagctagaaatagcaagttaaaataaggctagtccgttatcaacttgaaaaagtggcaccgagtcggtgctttt

SEQ ID NO: 749 - RNA, 100 nt, synthetic construct; identical to SEQ ID NO: 748
  source 1..100: mol_type = other RNA

SEQ ID NO: 750 - RNA, 100 nt, synthetic construct; identical to SEQ ID NO: 748
  source 1..100: mol_type = other RNA

SEQ ID NO: 751 - RNA, 109 nt, synthetic construct
  source 1..109: mol_type = other RNA
atctggatttcggcagtagttgttttagtactctgtaatgaaaattacagaatctactaaaacaaggcaaaatgccgtgtttatctcgtcaacttgttggcgagatttt

SEQ ID NO: 752 - RNA, 100 nt, synthetic construct
  source 1..100: mol_type = other RNA
gaacaaagacgtacgcatttgttttagagctagaaatagcaagttaaaataaggctagtccgttatcaacttgaaaaagtggcaccgagtcggtgctttt

SEQ ID NO: 753 - RNA, 100 nt, synthetic construct; identical to SEQ ID NO: 752
  source 1..100: mol_type = other RNA

SEQ ID NO: 754 - RNA, 100 nt, synthetic construct; identical to SEQ ID NO: 752
  source 1..100: mol_type = other RNA

SEQ ID NO: 755 - RNA, 109 nt, synthetic construct
  source 1..109: mol_type = other RNA
aaagaacaaagacgtacgcatgttttagtactctgtaatgaaaattacagaatctactaaaacaaggcaaaatgccgtgtttatctcgtcaacttgttggcgagatttt

SEQ ID NO: 756 - RNA, 109 nt, synthetic construct
  source 1..109: mol_type = other RNA
gaacaaagacgtacgcatttggttttagtactctgtaatgaaaattacagaatctactaaaacaaggcaaaatgccgtgtttatctcgtcaacttgttggcgagatttt

SEQ ID NO: 757 - RNA, 100 nt, synthetic construct
  source 1..100: mol_type = other RNA
aacaaagacgtacgcatttggttttagagctagaaatagcaagttaaaataaggctagtccgttatcaacttgaaaaagtggcaccgagtcggtgctttt

SEQ ID NO: 758 - RNA, 100 nt, synthetic construct
  source 1..100: mol_type = other RNA
aaagacgtacgcatttgggtgttttagagctagaaatagcaagttaaaataaggctagtccgttatcaacttgaaaaagtggcaccgagtcggtgctttt

SEQ ID NO: 759 - RNA, 100 nt, synthetic construct
  source 1..100: mol_type = other RNA
agaacaaagacgtacgcattgttttagagctagaaatagcaagttaaaataaggctagtccgttatcaacttgaaaaagtggcaccgagtcggtgctttt

SEQ ID NO: 760 - RNA, 100 nt, synthetic construct
  source 1..100: mol_type = other RNA
taacaccaaggactaatctcgttttagagctagaaatagcaagttaaaataaggctagtccgttatcaacttgaaaaagtggcaccgagtcggtgctttt

SEQ ID NO: 761 - RNA, 100 nt, synthetic construct; identical to SEQ ID NO: 760
  source 1..100: mol_type = other RNA

SEQ ID NO: 762 - RNA, 100 nt, synthetic construct; identical to SEQ ID NO: 760
  source 1..100: mol_type = other RNA

SEQ ID NO: 763 - RNA, 100 nt, synthetic construct; identical to SEQ ID NO: 760
  source 1..100: mol_type = other RNA

SEQ ID NO: 764 - RNA, 100 nt, synthetic construct
  source 1..100: mol_type = other RNA
gatccatggtataacaccaagttttagagctagaaatagcaagttaaaataaggctagtccgttatcaacttgaaaaagtggcaccgagtcggtgctttt

SEQ ID NO: 765 - RNA, 100 nt, synthetic construct
  source 1..100: mol_type = other RNA
gcgatgctcagacacagaaggttttagagctagaaatagcaagttaaaataaggctagtccgttatcaacttgaaaaagtggcaccgagtcggtgctttt

SEQ ID NO: 766 - RNA, 100 nt, synthetic construct; identical to SEQ ID NO: 765
  source 1..100: mol_type = other RNA

SEQ ID NO: 767 - RNA, 100 nt, synthetic construct; identical to SEQ ID NO: 765
  source 1..100: mol_type = other RNA

SEQ ID NO: 768 - RNA, 109 nt, synthetic construct
  source 1..109: mol_type = other RNA
atgctcagacacagaagggacgttttagtactctgtaatgaaaattacagaatctactaaaacaaggcaaaatgccgtgtttatctcgtcaacttgttggcgagatttt

SEQ ID NO: 769 - RNA, 100 nt, synthetic construct
  source 1..100: mol_type = other RNA
tgctcagacacagaagggacgttttagagctagaaatagcaagttaaaataaggctagtccgttatcaacttgaaaaagtggcaccgagtcggtgctttt

SEQ ID NO: 770 - RNA, 100 nt, synthetic construct
  source 1..100: mol_type = other RNA
cgatgctcagacacagaagggttttagagctagaaatagcaagttaaaataaggctagtccgttatcaacttgaaaaagtggcaccgagtcggtgctttt

SEQ ID NO: 771 - RNA, 100 nt, synthetic construct
  source 1..100: mol_type = other RNA
acgcgatgctcagacacagagttttagagctagaaatagcaagttaaaataaggctagtccgttatcaacttgaaaaagtggcaccgagtcggtgctttt

SEQ ID NO: 772 - RNA, 100 nt, synthetic construct
  source 1..100: mol_type = other RNA
cgcgatgctcagacacagaagttttagagctagaaatagcaagttaaaataaggctagtccgttatcaacttgaaaaagtggcaccgagtcggtgctttt

SEQ ID NO: 773 - RNA, 100 nt, synthetic construct
  source 1..100: mol_type = other RNA
ctcagacacagaagggactggttttagagctagaaatagcaagttaaaataaggctagtccgttatcaacttgaaaaagtggcaccgagtcggtgctttt

SEQ ID NO: 774 - RNA, 100 nt, synthetic construct
  source 1..100: mol_type = other RNA
ctgacgcgatgctcagacacgttttagagctagaaatagcaagttaaaataaggctagtccgttatcaacttgaaaaagtggcaccgagtcggtgctttt

SEQ ID NO: 775 - RNA, 100 nt, synthetic construct
  source 1..100: mol_type = other RNA
aacaaggagctgggcttcctgttttagagctagaaatagcaagttaaaataaggctagtccgttatcaacttgaaaaagtggcaccgagtcggtgctttt

SEQ ID NO: 776 - RNA, 100 nt, synthetic construct; identical to SEQ ID NO: 775
  source 1..100: mol_type = other RNA

SEQ ID NO: 777 - RNA, 100 nt, synthetic construct; identical to SEQ ID NO: 775
  source 1..100: mol_type = other RNA

SEQ ID NO: 778 - RNA, 100 nt, synthetic construct
  source 1..100: mol_type = other RNA
caaggagctgggcttccttggttttagagctagaaatagcaagttaaaataaggctagtccgttatcaacttgaaaaagtggcaccgagtcggtgctttt

SEQ ID NO: 779 - RNA, 100 nt, synthetic construct; identical to SEQ ID NO: 778
  source 1..100: mol_type = other RNA

SEQ ID NO: 780 - RNA, 100 nt, synthetic construct; identical to SEQ ID NO: 778
  source 1..100: mol_type = other RNA

SEQ ID NO: 781 - RNA, 100 nt, synthetic construct
  source 1..100: mol_type = other RNA
cattctcaataacaaggagcgttttagagctagaaatagcaagttaaaataaggctagtccgttatcaacttgaaaaagtggcaccgagtcggtgctttt

SEQ ID NO: 782 - RNA, 100 nt, synthetic construct
  source 1..100: mol_type = other RNA
attctcaataacaaggagctgttttagagctagaaatagcaagttaaaataaggctagtccgttatcaacttgaaaaagtggcaccgagtcggtgctttt

SEQ ID NO: 783 - RNA, 100 nt, synthetic construct
  source 1..100: mol_type = other RNA
tcttacctggcaactgtcaggttttagagctagaaatagcaagttaaaataaggctagtccgttatcaacttgaaaaagtggcaccgagtcggtgctttt

SEQ ID NO: 784 - RNA, 100 nt, synthetic construct; identical to SEQ ID NO: 783
  source 1..100: mol_type = other RNA

SEQ ID NO: 785 - RNA, 100 nt, synthetic construct; identical to SEQ ID NO: 783
  source 1..100: mol_type = other RNA

SEQ ID NO: 786 - RNA, 100 nt, synthetic construct
  source 1..100: mol_type = other RNA
tttcttacctggcaactgtcgttttagagctagaaatagcaagttaaaataaggctagtccgttatcaacttgaaaaagtggcaccgagtcggtgctttt

SEQ ID NO: 787 - RNA, 100 nt, synthetic construct
  source 1..100: mol_type = other RNA
gtgtctatgctcgtgtttcagttttagagctagaaatagcaagttaaaataaggctagtccgttatcaacttgaaaaagtggcaccgagtcggtgctttt

SEQ ID NO: 788 - RNA, 100 nt, synthetic construct; identical to SEQ ID NO: 787
  source 1..100: mol_type = other RNA

SEQ ID NO: 789 - RNA, 100 nt, synthetic construct; identical to SEQ ID NO: 787
  source 1..100: mol_type = other RNA

SEQ ID NO: 790 - RNA, 109 nt, synthetic construct
  source 1..109: mol_type = other RNA
ctggtgtctatgctcgtgtttgttttagtactctgtaatgaaaattacagaatctactaaaacaaggcaaaatgccgtgtttatctcgtcaacttgttggcgagatttt

SEQ ID NO: 791 - RNA, 100 nt, synthetic construct
  source 1..100: mol_type = other RNA
tgtctatgctcgtgtttcaagttttagagctagaaatagcaagttaaaataaggctagtccgttatcaacttgaaaaagtggcaccgagtcggtgctttt

SEQ ID NO: 792 - RNA, 100 nt, synthetic construct; identical to SEQ ID NO: 445
  source 1..100: mol_type = other RNA

SEQ ID NO: 793 - RNA, 100 nt, synthetic construct; identical to SEQ ID NO: 448
  source 1..100: mol_type = other RNA

SEQ ID NO: 794 - RNA, 100 nt, synthetic construct; identical to SEQ ID NO: 449
  source 1..100: mol_type = other RNA

SEQ ID NO: 795 - RNA, 100 nt, synthetic construct; identical to SEQ ID NO: 450
  source 1..100: mol_type = other RNA

SEQ ID NO: 796 - RNA, 100 nt, synthetic construct; identical to SEQ ID NO: 451
  source 1..100: mol_type = other RNA

SEQ ID NO: 797 - RNA, 100 nt, synthetic construct; identical to SEQ ID NO: 454
  source 1..100: mol_type = other RNA

SEQ ID NO: 798 - RNA, 109 nt, synthetic construct; identical to SEQ ID NO: 457
  source 1..109: mol_type = other RNA

SEQ ID NO: 799 - RNA, 100 nt, synthetic construct; identical to SEQ ID NO: 458
  source 1..100: mol_type = other RNA

SEQ ID NO: 800 - RNA, 100 nt, synthetic construct; identical to SEQ ID NO: 459
  source 1..100: mol_type = other RNA

SEQ ID NO: 801 - RNA, 100 nt, synthetic construct; identical to SEQ ID NO: 460
  source 1..100: mol_type = other RNA

SEQ ID NO: 802 - RNA, 100 nt, synthetic construct; identical to SEQ ID NO: 461
  source 1..100: mol_type = other RNA

SEQ ID NO: 803 - RNA, 109 nt, synthetic construct; identical to SEQ ID NO: 648
  source 1..109: mol_type = other RNA

SEQ ID NO: 804 - RNA, 100 nt, synthetic construct; identical to SEQ ID NO: 649
  source 1..100: mol_type = other RNA

SEQ ID NO: 805 - RNA, 100 nt, synthetic construct; identical to SEQ ID NO: 650
  source 1..100: mol_type = other RNA

SEQ ID NO: 806 - RNA, 100 nt, synthetic construct; identical to SEQ ID NO: 651
  source 1..100: mol_type = other RNA

SEQ ID NO: 807 - RNA, 109 nt, synthetic construct; identical to SEQ ID NO: 654
  source 1..109: mol_type = other RNA

SEQ ID NO: 808 - RNA, 100 nt, synthetic construct; identical to SEQ ID NO: 655
  source 1..100: mol_type = other RNA

SEQ ID NO: 809 - RNA, 100 nt, synthetic construct; identical to SEQ ID NO: 656
  source 1..100: mol_type = other RNA

SEQ ID NO: 810 - RNA, 100 nt, synthetic construct; identical to SEQ ID NO: 657
  source 1..100: mol_type = other RNA

SEQ ID NO: 811 - RNA, 100 nt, synthetic construct; identical to SEQ ID NO: 658
  source 1..100: mol_type = other RNA

SEQ ID NO: 812 - RNA, 100 nt, synthetic construct; identical to SEQ ID NO: 659
  source 1..100: mol_type = other RNA

SEQ ID NO: 813 - RNA, 100 nt, synthetic construct; identical to SEQ ID NO: 665
  source 1..100: mol_type = other RNA

SEQ ID NO: 814 - RNA, 109 nt, synthetic construct; identical to SEQ ID NO: 671
  source 1..109: mol_type = other RNA

SEQ ID NO: 815 - RNA, 100 nt, synthetic construct; identical to SEQ ID NO: 673
  source 1..100: mol_type = other RNA

SEQ ID NO: 816 - RNA, 100 nt, synthetic construct; identical to SEQ ID NO: 675
  source 1..100: mol_type = other RNA

SEQ ID NO: 817 - RNA, 100 nt, synthetic construct; identical to SEQ ID NO: 676
  source 1..100: mol_type = other RNA

SEQ ID NO: 818 - RNA, 100 nt, synthetic construct; identical to SEQ ID NO: 677
  source 1..100: mol_type = other RNA

SEQ ID NO: 819 - RNA, 109 nt, synthetic construct; identical to SEQ ID NO: 680
  source 1..109: mol_type = other RNA

SEQ ID NO: 820 - RNA, 100 nt, synthetic construct; identical to SEQ ID NO: 681
  source 1..100: mol_type = other RNA

SEQ ID NO: 821 - RNA, 100 nt, synthetic construct; identical to SEQ ID NO: 682
  source 1..100: mol_type = other RNA

SEQ ID NO: 822 - RNA, 100 nt, synthetic construct; identical to SEQ ID NO: 683
  source 1..100: mol_type = other RNA

SEQ ID NO: 823 - RNA, 100 nt, synthetic construct; identical to SEQ ID NO: 684
  source 1..100: mol_type = other RNA

SEQ ID NO: 824 - RNA, 100 nt, synthetic construct; identical to SEQ ID NO: 687
  source 1..100: mol_type = other RNA

SEQ ID NO: 825 - RNA, 100 nt, synthetic construct; identical to SEQ ID NO: 690
  source 1..100: mol_type = other RNA

SEQ ID NO: 826 - RNA, 109 nt, synthetic construct; identical to SEQ ID NO: 693
  source 1..109: mol_type = other RNA

SEQ ID NO: 827 - RNA, 100 nt, synthetic construct; identical to SEQ ID NO: 694
  source 1..100: mol_type = other RNA

SEQ ID NO: 828 - RNA, 100 nt, synthetic construct; identical to SEQ ID NO: 695
  source 1..100: mol_type = other RNA

SEQ ID NO: 829 - RNA, 100 nt, synthetic construct; identical to SEQ ID NO: 699
  source 1..100: mol_type = other RNA

SEQ ID NO: 830 - RNA, 109 nt, synthetic construct; identical to SEQ ID NO: 702
  source 1..109: mol_type = other RNA

SEQ ID NO: 831 - RNA, 100 nt, synthetic construct; identical to SEQ ID NO: 703
  source 1..100: mol_type = other RNA

SEQ ID NO: 832 - RNA, 109 nt, synthetic construct; identical to SEQ ID NO: 704
  source 1..109: mol_type = other RNA

SEQ ID NO: 833 - RNA, 109 nt, synthetic construct; identical to SEQ ID NO: 705
  source 1..109: mol_type = other RNA

SEQ ID NO: 834 - RNA, 109 nt, synthetic construct; identical to SEQ ID NO: 706
  source 1..109: mol_type = other RNA

SEQ ID NO: 835 - RNA, 100 nt, synthetic construct; identical to SEQ ID NO: 707
  source 1..100: mol_type = other RNA

SEQ ID NO: 836 - RNA, 100 nt, synthetic construct; identical to SEQ ID NO: 708
  source 1..100: mol_type = other RNA

SEQ ID NO: 837 - RNA, 100 nt, synthetic construct; identical to SEQ ID NO: 709
  source 1..100: mol_type = other RNA

SEQ ID NO: 838 - RNA, 100 nt, synthetic construct; identical to SEQ ID NO: 710
  source 1..100: mol_type = other RNA

SEQ ID NO: 839 - RNA, 100 nt, synthetic construct; identical to SEQ ID NO: 711
  source 1..100: mol_type = other RNA

SEQ ID NO: 840 - RNA, 100 nt, synthetic construct; identical to SEQ ID NO: 712
  source 1..100: mol_type = other RNA

SEQ ID NO: 841 - RNA, 100 nt, synthetic construct; identical to SEQ ID NO: 715
  source 1..100: mol_type = other RNA

SEQ ID NO: 842 - RNA, 100 nt, synthetic construct; identical to SEQ ID NO: 718
  source 1..100: mol_type = other RNA

SEQ ID NO: 843 - RNA, 100 nt, synthetic construct; identical to SEQ ID NO: 719
  source 1..100: mol_type = other RNA

SEQ ID NO: 844 - RNA, 100 nt, synthetic construct; identical to SEQ ID NO: 720
  source 1..100: mol_type = other RNA

SEQ ID NO: 845 - RNA, 100 nt, synthetic construct; identical to SEQ ID NO: 721
  source 1..100: mol_type = other RNA

SEQ ID NO: 846 - RNA, 100 nt, synthetic construct; identical to SEQ ID NO: 722
  source 1..100: mol_type = other RNA

SEQ ID NO: 847 - RNA, 100 nt, synthetic construct; identical to SEQ ID NO: 725
  source 1..100: mol_type = other RNA

SEQ ID NO: 848 - RNA, 100 nt, synthetic construct; identical to SEQ ID NO: 729
  source 1..100: mol_type = other RNA

SEQ ID NO: 849 - RNA, 100 nt, synthetic construct; identical to SEQ ID NO: 730
  source 1..100: mol_type = other RNA

SEQ ID NO: 850 - RNA, 100 nt, synthetic construct; identical to SEQ ID NO: 731
  source 1..100: mol_type = other RNA

SEQ ID NO: 851 - RNA, 100 nt, synthetic construct; identical to SEQ ID NO: 732
  source 1..100: mol_type = other RNA

SEQ ID NO: 852 - RNA, 100 nt, synthetic construct; identical to SEQ ID NO: 733
  source 1..100: mol_type = other RNA

SEQ ID NO: 853 - RNA, 100 nt, synthetic construct; identical to SEQ ID NO: 736
  source 1..100: mol_type = other RNA

SEQ ID NO: 854 - RNA, 100 nt, synthetic construct; identical to SEQ ID NO: 738
  source 1..100: mol_type = other RNA

SEQ ID NO: 855 - RNA, 109 nt, synthetic construct; identical to SEQ ID NO: 741
  source 1..109: mol_type = other RNA

SEQ ID NO: 856 - RNA, 100 nt, synthetic construct; identical to SEQ ID NO: 742
  source 1..100: mol_type = other RNA

SEQ ID NO: 857 - RNA, 100 nt, synthetic construct; identical to SEQ ID NO: 743
  source 1..100: mol_type = other RNA

SEQ ID NO: 858 - RNA, 100 nt, synthetic construct; identical to SEQ ID NO: 744
  source 1..100: mol_type = other RNA

SEQ ID NO: 859 - RNA, 100 nt, synthetic construct; identical to SEQ ID NO: 746
  source 1..100: mol_type = other RNA

SEQ ID NO: 860 - RNA, 100 nt, synthetic construct; identical to SEQ ID NO: 747
  source 1..100: mol_type = other RNA

SEQ ID NO: 861 - RNA, 100 nt, synthetic construct; identical to SEQ ID NO: 748
  source 1..100: mol_type = other RNA

SEQ ID NO: 862 - RNA, 109 nt, synthetic construct; identical to SEQ ID NO: 751
  source 1..109: mol_type = other RNA

SEQ ID NO: 863 - RNA, 100 nt, synthetic construct; identical to SEQ ID NO: 752
  source 1..100: mol_type = other RNA

SEQ ID NO: 864 - RNA, 109 nt, synthetic construct; identical to SEQ ID NO: 755
  source 1..109: mol_type = other RNA

SEQ ID NO: 865 - RNA, 109 nt, synthetic construct; identical to SEQ ID NO: 756
  source 1..109: mol_type = other RNA

SEQ ID NO: 866 - RNA, 100 nt, synthetic construct; identical to SEQ ID NO: 757
  source 1..100: mol_type = other RNA

SEQ ID NO: 867 - RNA, 100 nt, synthetic construct; identical to SEQ ID NO: 758
  source 1..100: mol_type = other RNA

SEQ ID NO: 868 - RNA, 100 nt, synthetic construct; identical to SEQ ID NO: 759
  source 1..100: mol_type = other RNA

SEQ ID NO: 869 - RNA, 100 nt, synthetic construct; identical to SEQ ID NO: 760
  source 1..100: mol_type = other RNA

SEQ ID NO: 870 - RNA, 100 nt, synthetic construct; identical to SEQ ID NO: 764
  source 1..100: mol_type = other RNA

SEQ ID NO: 871 - RNA, 100 nt, synthetic construct; identical to SEQ ID NO: 765
  source 1..100: mol_type = other RNA

SEQ ID NO: 872 - RNA, 109 nt, synthetic construct; identical to SEQ ID NO: 768
  source 1..109: mol_type = other RNA

SEQ ID NO: 873 - RNA, 100 nt, synthetic construct; identical to SEQ ID NO: 769
  source 1..100: mol_type = other RNA

SEQ ID NO: 874 - RNA, 100 nt, synthetic construct; identical to SEQ ID NO: 770
  source 1..100: mol_type = other RNA

SEQ ID NO: 875 - RNA, 100 nt, synthetic construct; identical to SEQ ID NO: 771
  source 1..100: mol_type = other RNA

SEQ ID NO: 876 - RNA, 100 nt, synthetic construct; identical to SEQ ID NO: 772
  source 1..100: mol_type = other RNA

SEQ ID NO: 877 - RNA, 100 nt, synthetic construct; identical to SEQ ID NO: 773
  source 1..100: mol_type = other RNA

SEQ ID NO: 878 - RNA, 100 nt, synthetic construct; identical to SEQ ID NO: 774
  source 1..100: mol_type = other RNA

SEQ ID NO: 879 - RNA, 100 nt, synthetic construct; identical to SEQ ID NO: 775
  source 1..100: mol_type = other RNA

SEQ ID NO: 880 - RNA, 100 nt, synthetic construct; identical to SEQ ID NO: 778
  source 1..100: mol_type = other RNA

SEQ ID NO: 881 - RNA, 100 nt, synthetic construct; identical to SEQ ID NO: 781
  source 1..100: mol_type = other RNA

SEQ ID NO: 882 - RNA, 100 nt, synthetic construct; identical to SEQ ID NO: 782
  source 1..100: mol_type = other RNA

SEQ ID NO: 883 - RNA, 100 nt, synthetic construct; identical to SEQ ID NO: 783
  source 1..100: mol_type = other RNA

SEQ ID NO: 884 - RNA, 100 nt, synthetic construct; identical to SEQ ID NO: 786
  source 1..100: mol_type = other RNA

SEQ ID NO: 885 - RNA, 100 nt, synthetic construct; identical to SEQ ID NO: 787
  source 1..100: mol_type = other RNA

SEQ ID NO: 886 - RNA, 109 nt, synthetic construct; identical to SEQ ID NO: 790
  source 1..109: mol_type = other RNA

SEQ ID NO: 887 - RNA, 100 nt, synthetic construct; identical to SEQ ID NO: 791
  source 1..100: mol_type = other RNA

SEQ ID NO: 888 - DNA, 23 bp, synthetic construct
  source 1..23: mol_type = other DNA
cactggcatcagaggaccccaga

SEQ ID NO: 889 - DNA, 22 bp, synthetic construct
  source 1..22: mol_type = other DNA
cactggcatcagaggaccccag

SEQ ID NO: 890 - DNA, 23 bp, synthetic construct
  source 1..23: mol_type = other DNA
cactggcatcagaggaccccaga

SEQ ID NO: 891 - DNA, 24 bp, synthetic construct
  source 1..24: mol_type = other DNA
ggcatcagaggaccccagaaaact

SEQ ID NO: 892 - DNA, 23 bp, synthetic construct
  source 1..23: mol_type = other DNA
tgataccacactggcatcagagg

SEQ ID NO: 893 - DNA, 23 bp, synthetic construct
  source 1..23: mol_type = other DNA
gataccacactggcatcagagga

SEQ ID NO: 894 - DNA, 23 bp, synthetic construct
  source 1..23: mol_type = other DNA
gggcttttctcaggtggtgctga

SEQ ID NO: 895 - DNA, 22 bp, synthetic construct
  source 1..22: mol_type = other DNA
gggcttttctcaggtggtgctg

SEQ ID NO: 896 - DNA, 23 bp, synthetic construct
  source 1..23: mol_type = other DNA
gggcttttctcaggtggtgctga

SEQ ID NO: 897 - DNA, 23 bp, synthetic construct
  source 1..23: mol_type = other DNA
acagggcttttctcaggtggtgc

SEQ ID NO: 898 - DNA, 22 bp, synthetic construct
  source 1..22: mol_type = other DNA
acagggcttttctcaggtggtg

SEQ ID NO: 899 - DNA, 24 bp, synthetic construct
  source 1..24: mol_type = other DNA
acagggcttttctcaggtggtgct

SEQ ID NO: 900 - DNA, 27 bp, synthetic construct
  source 1..27: mol_type = other DNA
agggcttttctcaggtggtgctgaaat

SEQ ID NO: 901 - DNA, 22 bp, synthetic construct
  source 1..22: mol_type = other DNA
ccacagggcttttctcaggtgg

SEQ ID NO: 902 - DNA, 23 bp, synthetic construct
  source 1..23: mol_type = other DNA
tggaccacagggcttttctcagg

SEQ ID NO: 903 - DNA, 23 bp, synthetic construct
  source 1..23: mol_type = other DNA
accacagggcttttctcaggtgg

SEQ ID NO: 904 - DNA, 23 bp, synthetic construct
  source 1..23: mol_type = other DNA
cactggcatcagagaaccacaga

SEQ ID NO: 905 - DNA, 22 bp, synthetic construct
  source 1..22: mol_type = other DNA
cactggcatcagagaaccacag

SEQ ID NO: 906 - DNA, 23 bp, synthetic construct
  source 1..23: mol_type = other DNA
cactggcatcagagaaccacaga

SEQ ID NO: 907 - DNA, 27 bp, synthetic construct
  source 1..27: mol_type = other DNA
cacactggcatcagagaaccacagaat

SEQ ID NO: 908 - DNA, 24 bp, synthetic construct
  source 1..24: mol_type = other DNA
ggcatcagagaaccacagaatact

SEQ ID NO: 909 - DNA, 23 bp, synthetic construct
  source 1..23: mol_type = other DNA
tgacaccacactggcatcagaga

SEQ ID NO: 910 - DNA, 23 bp, synthetic construct
  source 1..23: mol_type = other DNA
tactgccgtaaccctgatggtga

SEQ ID NO: 911 - DNA, 22 bp, synthetic construct
  source 1..22: mol_type = other DNA
tactgccgtaaccctgatggtg

SEQ ID NO: 912 - DNA, 23 bp, synthetic construct
  source 1..23: mol_type = other DNA
tactgccgtaaccctgatggtga

SEQ ID NO: 913 - DNA, 27 bp, synthetic construct
  source 1..27: mol_type = other DNA
tgccgtaaccctgatggtgacatcaat

SEQ ID NO: 914 - DNA, 22 bp, synthetic construct
  source 1..22: mol_type = other DNA
agtactgccgtaaccctgatgg

SEQ ID NO: 915 - DNA, 24 bp, synthetic construct
  source 1..24: mol_type = other DNA
actgccgtaaccctgatggtgaca

SEQ ID NO: 916 - DNA, 23 bp, synthetic construct
  source 1..23: mol_type = other DNA
cagtactgccgtaaccctgatgg

SEQ ID NO: 917 - DNA, 23 bp, synthetic construct
  source 1..23: mol_type = other DNA
tttcagtactgccgtaaccctga

SEQ ID NO: 918 - DNA, 23 bp, synthetic construct
  source 1..23: mol_type = other DNA
ggctccttccgaacaaggtaagg

SEQ ID NO: 919 - DNA, 22 bp, synthetic construct
  source 1..22: mol_type = other DNA
ggctccttccgaacaaggtaag

SEQ ID NO: 920 - DNA, 23 bp, synthetic construct
  source 1..23: mol_type = other DNA
ggctccttccgaacaaggtaagg

SEQ ID NO: 921 - DNA, 23 bp, synthetic construct
  source 1..23: mol_type = other DNA
ggctccttccgaacaaggtaagg

SEQ ID NO: 922 - DNA, 22 bp, synthetic construct
  source 1..22: mol_type = other DNA
ggctccttccgaacaaggtaag

SEQ ID NO: 923 - DNA, 23 bp, synthetic construct
  source 1..23: mol_type = other DNA
ggctccttccgaacaaggtaagg

SEQ ID NO: 924 - DNA, 23 bp, synthetic construct
  source 1..23: mol_type = other DNA
gctccttccgaacaaggtaagga

SEQ ID NO: 925 - DNA, 22 bp, synthetic construct
  source 1..22: mol_type = other DNA
gctccttccgaacaaggtaagg

SEQ ID NO: 926 - DNA, 23 bp, synthetic construct
  source 1..23: mol_type = other DNA
gctccttccgaacaaggtaagga

SEQ ID NO: 927 - DNA, 23 bp, synthetic construct
  source 1..23: mol_type = other DNA
gctccttccgaacaaggtaagga

SEQ ID NO: 928 - DNA, 22 bp, synthetic construct
  source 1..22: mol_type = other DNA
gctccttccgaacaaggtaagg

SEQ ID NO: 929 - DNA, 23 bp, synthetic construct
  source 1..23: mol_type = other DNA
gctccttccgaacaaggtaagga

SEQ ID NO: 930 - DNA, 27 bp, synthetic construct
  source 1..27: mol_type = other DNA
aggctccttccgaacaaggtaaggagt

SEQ ID NO: 931 - DNA, 27 bp, synthetic construct
  source 1..27: mol_type = other DNA
aggctccttccgaacaaggtaaggagt

SEQ ID NO: 932 - DNA, 23 bp, synthetic construct
  source 1..23: mol_type = other DNA
ctagaggctccttccgaacaagg

SEQ ID NO: 933 - DNA, 23 bp, synthetic construct
  source 1..23: mol_type = other DNA
ctagaggctccttccgaacaagg

SEQ ID NO: 934 - DNA, 22 bp, synthetic construct
  source 1..22: mol_type = other DNA
tagaggctccttccgaacaagg

SEQ ID NO: 935 - DNA, 23 bp, synthetic construct
  source 1..23: mol_type = other DNA
ccaagcctagaggctccttccga

SEQ ID NO: 936 - DNA, 23 bp, synthetic construct
  source 1..23: mol_type = other DNA
tccacggctgtttctgaacaagg

SEQ ID NO: 937 - DNA, 22 bp, synthetic construct
  source 1..22: mol_type = other DNA
tccacggctgtttctgaacaag

SEQ ID NO: 938 - DNA, 23 bp, synthetic construct
  source 1..23: mol_type = other DNA
tccacggctgtttctgaacaagg

SEQ ID NO: 939 - DNA, 27 bp, synthetic construct
  source 1..27: mol_type = other DNA
acgtccacggctgtttctgaacaaggt

SEQ ID NO: 940 - DNA, 22 bp, synthetic construct
  source 1..22: mol_type = other DNA
ccacggctgtttctgaacaagg

SEQ ID NO: 941 - DNA, 24 bp, synthetic construct
  source 1..24: mol_type = other DNA
gacgtccacggctgtttctgaaca

SEQ ID NO: 942 - DNA, 23 bp, synthetic construct
  source 1..23: mol_type = other DNA
gcgacgtccacggctgtttctga

SEQ ID NO: 943 - DNA, 23 bp, synthetic construct
  source 1..23: mol_type = other DNA
tactcatttgggtagttttctgg

SEQ ID NO: 944 - DNA, 22 bp, synthetic construct
  source 1..22: mol_type = other DNA
tactcatttgggtagttttctg

SEQ ID NO: 945 - DNA, 23 bp, synthetic construct
  source 1..23: mol_type = other DNA
tactcatttgggtagttttctgg

SEQ ID NO: 946 - DNA, 23 bp, synthetic construct
  source 1..23: mol_type = other DNA
actcatttgggtagttttctggg

SEQ ID NO: 947 - DNA, 22 bp, synthetic construct
  source 1..22: mol_type = other DNA
actcatttgggtagttttctgg

SEQ ID NO: 948 - DNA, 23 bp, synthetic construct
  source 1..23: mol_type = other DNA
actcatttgggtagttttctggg

SEQ ID NO: 949 - DNA, 23 bp, synthetic construct
  source 1..23: mol_type = other DNA
ctcatttgggtagttttctgggg

SEQ ID NO: 950 - DNA, 22 bp, synthetic construct
  source 1..22: mol_type = other DNA
ctcatttgggtagttttctggg

SEQ ID NO: 951 - DNA, 23 bp, synthetic construct
  source 1..23: mol_type = other DNA
ctcatttgggtagttttctgggg

SEQ ID NO: 952 - DNA, 27 bp, synthetic construct
  source 1..27: mol_type = other DNA
atactcatttgggtagttttctggggt

SEQ ID NO: 953 - DNA, 22 bp, synthetic construct
  source 1..22: mol_type = other DNA
tcatttgggtagttttctgggg

SEQ ID NO: 954 - DNA, 23 bp, synthetic construct
  source 1..23: mol_type = other DNA
agtaacagtggttgccttcttgc

SEQ ID NO: 955 - DNA, 22 bp, synthetic construct
  source 1..22: mol_type = other DNA
agtaacagtggttgccttcttg

SEQ ID NO: 956 - DNA, 23 bp, synthetic construct
  source 1..23: mol_type = other DNA
agtaacagtggttgccttcttgc

SEQ ID NO: 957 - DNA, 24 bp, synthetic construct
  source 1..24: mol_type = other DNA
agtaacagtggttgccttcttgcc

SEQ ID NO: 958 - DNA, 23 bp, synthetic construct
  source 1..23: mol_type = other DNA
ctgcgtctgagcattgcgtcagg

SEQ ID NO: 959 - DNA, 22 bp, synthetic construct
  source 1..22: mol_type = other DNA
ctgcgtctgagcattgcgtcag

SEQ ID NO: 960 - DNA, 23 bp, synthetic construct
  source 1..23: mol_type = other DNA
ctgcgtctgagcattgcgtcagg

SEQ ID NO: 961 - DNA, 27 bp, synthetic construct
  source 1..27: mol_type = other DNA
cttctgcgtctgagcattgcgtcaggt

SEQ ID NO: 962 - DNA, 22 bp, synthetic construct
  source 1..22: mol_type = other DNA
ccttctgcgtctgagcattgcg

SEQ ID NO: 963 - DNA, 27 bp, synthetic construct
  source 1..27: mol_type = other DNA
atgtgcctcggtaactctgtccataat

SEQ ID NO: 964 - DNA, 27 bp, synthetic construct
  source 1..27: mol_type = other DNA
tgcctcggtaactctgtccataatggt

SEQ ID NO: 965 - DNA, 27 bp, synthetic construct
  source 1..27: mol_type = other DNA
ctcggtaactctgtccataatggtagt

SEQ ID NO: 966 - DNA, 23 bp, synthetic construct
  source 1..23: mol_type = other DNA
ctcggtaactctgtccataatgg

SEQ ID NO: 967 - DNA, 23 bp, synthetic construct
  source 1..23: mol_type = other DNA
ggtaatggccagagttatcgagg

SEQ ID NO: 968 - DNA, 23 bp, synthetic construct
  source 1..23: mol_type = other DNA
gtaatggccagagttatcgaggc

SEQ ID NO: 969 - DNA, 24 bp, synthetic construct
  source 1..24: mol_type = other DNA
aatggccagagttatcgaggcaca

SEQ ID NO: 970 - DNA, 23 bp, synthetic construct
  source 1..23: mol_type = other DNA
atggtaatggccagagttatcga

SEQ ID NO: 971 - DNA, 23 bp, synthetic construct
  source 1..23: mol_type = other DNA
cgtccctccgaatgttattctgg

SEQ ID NO: 972 - DNA, 22 bp, synthetic construct
  source 1..22: mol_type = other DNA
cgtccctccgaatgttattctg

SEQ ID NO: 973 - DNA, 23 bp, synthetic construct
  source 1..23: mol_type = other DNA
cgtccctccgaatgttattctgg

SEQ ID NO: 974 - DNA, 23 bp, synthetic construct
  source 1..23: mol_type = other DNA
gtccctccgaatgttattctggc

SEQ ID NO: 975 - DNA, 22 bp, synthetic construct
  source 1..22: mol_type = other DNA
gtccctccgaatgttattctgg

SEQ ID NO: 976 - DNA, 24 bp, synthetic construct
  source 1..24: mol_type = other DNA
gtccctccgaatgttattctggct

SEQ ID NO: 977 - DNA, 23 bp, synthetic construct
  source 1..23: mol_type = other DNA
gtgatggacagagttatcgaggc

SEQ ID NO: 978 - DNA, 24 bp, synthetic construct
  source 1..24: mol_type = other DNA
tggacagagttatcgaggcacact

SEQ ID NO: 979 - DNA, 23 bp, synthetic construct
  source 1..23: mol_type = other DNA
ggtgatggacagagttatcgagg

SEQ ID NO: 980 - DNA, 23 bp, synthetic construct
  source 1..23: mol_type = other DNA
gaggtgatggacagagttatcga

SEQ ID NO: 981 - DNA, 23 bp, synthetic construct
  source 1..23: mol_type = other DNA
acacactttctgggcactgctgg

SEQ ID NO: 982 - DNA, 22 bp, synthetic construct
  source 1..22: mol_type = other DNA
acacactttctgggcactgctg

SEQ ID NO: 983 - DNA, 23 bp, synthetic construct
  source 1..23: mol_type = other DNA
acacactttctgggcactgctgg

SEQ ID NO: 984 - DNA, 23 bp, synthetic construct
  source 1..23: mol_type = other DNA
gggacacactttctgggcactgc

SEQ ID NO: 985 - DNA, 22 bp, synthetic construct
  source 1..22: mol_type = other DNA
gggacacactttctgggcactg

SEQ ID NO: 986 - DNA, 23 bp, synthetic construct
  source 1..23: mol_type = other DNA
gggacacactttctgggcactgc

SEQ ID NO: 987 - DNA, 24 bp, synthetic construct
  source 1..24: mol_type = other DNA
gggacacactttctgggcactgct

SEQ ID NO: 988 - DNA, 23 bp, synthetic construct
  source 1..23: mol_type = other DNA
gggattgggacacactttctggg

SEQ ID NO: 989 - DNA, 23 bp, synthetic construct
  source 1..23: mol_type = other DNA
ggattgggacacactttctgggc

SEQ ID NO: 990 - DNA, 24 bp, synthetic construct
  source 1..24: mol_type = other DNA
attgggacacactttctgggcact

SEQ ID NO: 991 - DNA, 23 bp, synthetic construct
  source 1..23: mol_type = other DNA
tgggattgggacacactttctgg

SEQ ID NO: 992 - DNA, 23 bp, synthetic construct
  source 1..23: mol_type = other DNA
atgcctcgccctgcttcggctgg

SEQ ID NO: 993 - DNA, 22 bp, synthetic construct
  source 1..22: mol_type = other DNA
atgcctcgccctgcttcggctg

SEQ ID NO: 994 - DNA, 23 bp, synthetic construct
  source 1..23: mol_type = other DNA
atgcctcgccctgcttcggctgg

SEQ ID NO: 995 - DNA, 23 bp, synthetic construct
  source 1..23: mol_type = other DNA
tgcctcgccctgcttcggctggc

SEQ ID NO: 996 - DNA, 22 bp, synthetic construct
  source 1..22: mol_type = other DNA
tgcctcgccctgcttcggctgg

SEQ ID NO: 997 - DNA, 23 bp, synthetic construct
  source 1..23: mol_type = other DNA
cctcgccctgcttcggctggcgc

SEQ ID NO: 998 - DNA, 22 bp, synthetic construct
  source 1..22: mol_type = other DNA
cctcgccctgcttcggctggcg

SEQ ID NO: 999 - DNA, 24 bp, synthetic construct
  source 1..24: mol_type = other DNA
cctcgccctgcttcggctggcgca

SEQ ID NO: 1000 - DNA, 27 bp, synthetic construct
  source 1..27: mol_type = other DNA
ctcgccctgcttcggctggcgcacagt

SEQ ID NO: 1001 - DNA, 24 bp, synthetic construct
  source 1..24: mol_type = other DNA
tcgccctgcttcggctggcgcaca

SEQ ID NO: 1002 - DNA, 23 bp, synthetic construct
  source 1..23: mol_type = other DNA
ggcaatgcctcgccctgcttcgg

SEQ ID NO: 1003 - DNA, 23 bp, synthetic construct
  source 1..23: mol_type = other DNA
ggtcactcccacccgaatactgc

SEQ ID NO: 1004 - DNA, 22 bp, synthetic construct
  source 1..22: mol_type = other DNA
ggtcactcccacccgaatactg

SEQ ID NO: 1005 - DNA, 24 bp, synthetic construct
  source 1..24: mol_type = other DNA
tcgggtcactcccacccgaatact

SEQ ID NO: 1006 - DNA, 23 bp, synthetic construct
  source 1..23: mol_type = other DNA
aaaatcgggtcactcccacccga

SEQ ID NO: 1007 - DNA, 23 bp, synthetic construct
  source 1..23: mol_type = other DNA
tggatttcggcagtagttcttga

SEQ ID NO: 1008 - DNA, 22 bp, synthetic construct
  source 1..22: mol_type = other DNA
tggatttcggcagtagttcttg

SEQ ID NO: 1009 - DNA, 23 bp, synthetic construct
  source 1..23: mol_type = other DNA
tggatttcggcagtagttcttga

SEQ ID NO: 1010 - DNA, 27 bp, synthetic construct
  source 1..27: mol_type = other DNA
atctggatttcggcagtagttcttgat

SEQ ID NO: 1011 - DNA, 23 bp, synthetic construct
  source 1..23: mol_type = other DNA
gaacaaagacgtacgcatttggg

SEQ ID NO: 1012 - DNA, 22 bp, synthetic construct
  source 1..22: mol_type = other DNA
gaacaaagacgtacgcatttgg

SEQ ID NO: 1013 - DNA, 23 bp, synthetic construct
  source 1..23: mol_type = other DNA
gaacaaagacgtacgcatttggg

SEQ ID NO: 1014 - DNA, 27 bp, synthetic construct
  source 1..27: mol_type = other DNA
aaagaacaaagacgtacgcatttgggt

SEQ ID NO: 1015 - DNA, 27 bp, synthetic construct
  source 1..27: mol_type = other DNA
gaacaaagacgtacgcatttgggtagt

SEQ ID NO: 1016 - DNA, 22 bp, synthetic construct
  source 1..22: mol_type = other DNA
aacaaagacgtacgcatttggg

SEQ ID NO: 1017 - DNA, 22 bp, synthetic construct
  source 1..22: mol_type = other DNA
aaagacgtacgcatttgggtag

SEQ ID NO: 1018 - DNA, 23 bp, synthetic construct
  source 1..23: mol_type = other DNA
agaacaaagacgtacgcatttgg

SEQ ID NO: 1019 - DNA, 23 bp, synthetic construct
  source 1..23: mol_type = other DNA
taacaccaaggactaatctcagc

SEQ ID NO: 1020 - DNA, 22 bp, synthetic construct
  source 1..22: mol_type = other DNA
taacaccaaggactaatctcag

SEQ ID NO: 1021 - DNA, 23 bp, synthetic construct
  source 1..23: mol_type = other DNA
taacaccaaggactaatctcagc

SEQ ID NO: 1022 - DNA, 24 bp, synthetic construct
  source 1..24: mol_type = other DNA
taacaccaaggactaatctcagca

SEQ ID NO: 1023 - DNA, 23 bp, synthetic construct
  source 1..23: mol_type = other DNA
gatccatggtataacaccaagga

SEQ ID NO: 1024 - DNA, 23 bp, synthetic construct
  source 1..23: mol_type = other DNA
gcgatgctcagacacagaaggga

SEQ ID NO: 1025 - DNA, 22 bp, synthetic construct
  source 1..22: mol_type = other DNA
gcgatgctcagacacagaaggg

SEQ ID NO: 1026 - DNA, 23 bp, synthetic construct
  source 1..23: mol_type = other DNA
gcgatgctcagacacagaaggga

SEQ ID NO: 1027 - DNA, 27 bp, synthetic construct
  source 1..27: mol_type = other DNA
atgctcagacacagaagggactgtggt

SEQ ID NO: 1028 - DNA, 22 bp, synthetic construct
  source 1..22: mol_type = other DNA
tgctcagacacagaagggactg

SEQ ID NO: 1029 - DNA, 24 bp, synthetic construct
  source 1..24: mol_type = other DNA
cgatgctcagacacagaagggact

SEQ ID NO: 1030 - DNA, 23 bp, synthetic construct
  source 1..23: mol_type = other DNA
acgcgatgctcagacacagaagg

SEQ ID NO: 1031 - DNA, 23 bp, synthetic construct
  source 1..23: mol_type = other DNA
cgcgatgctcagacacagaaggg

SEQ ID NO: 1032 - DNA, 23 bp, synthetic construct
  source 1..23: mol_type = other DNA
ctcagacacagaagggactgtgg

SEQ ID NO: 1033 - DNA, 23 bp, synthetic construct
  source 1..23: mol_type = other DNA
ctgacgcgatgctcagacacaga

SEQ ID NO: 1034 - DNA, 23 bp, synthetic construct
  source 1..23: mol_type = other DNA
aacaaggagctgggcttccttga

SEQ ID NO: 1035 - DNA, 22 bp, synthetic construct
  source 1..22: mol_type = other DNA
aacaaggagctgggcttccttg

SEQ ID NO: 1036 - DNA, 23 bp, synthetic construct
  source 1..23: mol_type = other DNA
aacaaggagctgggcttccttga

SEQ ID NO: 1037 - DNA, 23 bp, synthetic construct
  source 1..23: mol_type = other DNA
caaggagctgggcttccttgaga

SEQ ID NO: 1038 - DNA, 22 bp, synthetic construct
  source 1..22: mol_type = other DNA
caaggagctgggcttccttgag

SEQ ID NO: 1039 - DNA, 23 bp, synthetic construct
  source 1..23: mol_type = other DNA
caaggagctgggcttccttgaga

SEQ ID NO: 1040 - DNA, 23 bp, synthetic construct
  source 1..23: mol_type = other DNA
cattctcaataacaaggagctgg

SEQ ID NO: 1041 - DNA, 23 bp, synthetic construct
  source 1..23: mol_type = other DNA
attctcaataacaaggagctggg

SEQ ID NO: 1042 - DNA, 23 bp, synthetic construct
  source 1..23: mol_type = other DNA
tcttacctggcaactgtcagtgc

SEQ ID NO: 1043 - DNA, 22 bp, synthetic construct
  source 1..22: mol_type = other DNA
tcttacctggcaactgtcagtg

SEQ ID NO: 1044 - DNA, 24 bp, synthetic construct
  source 1..24: mol_type = other DNA
tcttacctggcaactgtcagtgcc

SEQ ID NO: 1045 - DNA, 22 bp, synthetic construct
  source 1..22: mol_type = other DNA
tttcttacctggcaactgtcag

SEQ ID NO: 1046 - DNA, 23 bp, synthetic construct
  source 1..23: mol_type = other DNA
gtgtctatgctcgtgtttcaagg

SEQ ID NO: 1047 - DNA, 22 bp, synthetic construct
  source 1..22: mol_type = other DNA
gtgtctatgctcgtgtttcaag

SEQ ID NO: 1048 - DNA, 23 bp, synthetic construct
  source 1..23: mol_type = other DNA
gtgtctatgctcgtgtttcaagg

SEQ ID NO: 1049 - DNA, 27 bp, synthetic construct
  source 1..27: mol_type = other DNA
ctggtgtctatgctcgtgtttcaaggt

SEQ ID NO: 1050 - DNA, 22 bp, synthetic construct
  source 1..22: mol_type = other DNA
tgtctatgctcgtgtttcaagg

SEQ ID NO: 1051 - RNA, 20 nt, synthetic construct
  source 1..20: mol_type = other RNA
cactggcatcagaggacccc

SEQ ID NO: 1052 - RNA, 20 nt, synthetic construct
  source 1..20: mol_type = other RNA
cactggcatcagaggacccc

SEQ ID NO: 1053 - RNA, 20 nt, synthetic construct
  source 1..20: mol_type = other RNA
cactggcatcagaggacccc

SEQ ID NO: 1054 - RNA, 20 nt, synthetic construct
  source 1..20: mol_type = other RNA
ggcatcagaggaccccagaa

SEQ ID NO: 1055 - RNA, 20 nt, synthetic construct
  source 1..20: mol_type = other RNA
tgataccacactggcatcag

SEQ ID NO: 1056 - RNA, 20 nt, synthetic construct
  source 1..20: mol_type = other RNA
gataccacactggcatcaga

SEQ ID NO: 1057 - RNA, 20 nt, synthetic construct
  source 1..20: mol_type = other RNA
gggcttttctcaggtggtgc

SEQ ID NO: 1058 - RNA, 20 nt, synthetic construct
  source 1..20: mol_type = other RNA
gggcttttctcaggtggtgc

SEQ ID NO: 1059 - RNA, 20 nt, synthetic construct
  source 1..20: mol_type = other RNA
gggcttttctcaggtggtgc

SEQ ID NO: 1060 - RNA, 20 nt, synthetic construct
  source 1..20: mol_type = other RNA
acagggcttttctcaggtgg

SEQ ID NO: 1061 - RNA, 20 nt, synthetic construct
  source 1..20: mol_type = other RNA
acagggcttttctcaggtgg

SEQ ID NO: 1062 - RNA, 20 nt, synthetic construct
  source 1..20: mol_type = other RNA
acagggcttttctcaggtgg

SEQ ID NO: 1063 - RNA, 21 nt, synthetic construct
  source 1..21: mol_type = other RNA
agggcttttctcaggtggtgc

SEQ ID NO: 1064 - RNA, 20 nt, synthetic construct
  source 1..20: mol_type = other RNA
ccacagggcttttctcaggt

SEQ ID NO: 1065 - RNA, 20 nt, synthetic construct
  source 1..20: mol_type = other RNA
tggaccacagggcttttctc

SEQ ID NO: 1066 - RNA, 20 nt, synthetic construct
  source 1..20: mol_type = other RNA
accacagggcttttctcagg

SEQ ID NO: 1067 - RNA, 20 nt, synthetic construct
  source 1..20: mol_type = other RNA
cactggcatcagagaaccac

SEQ ID NO: 1068 - RNA, 20 nt, synthetic construct
  source 1..20: mol_type = other RNA
cactggcatcagagaaccac

SEQ ID NO: 1069 - RNA, 20 nt, synthetic construct
  source 1..20: mol_type = other RNA
cactggcatcagagaaccac

SEQ ID NO: 1070 - RNA, 21 nt, synthetic construct
  source 1..21: mol_type = other RNA
cacactggcatcagagaacca

SEQ ID NO: 1071 - RNA, 20 nt, synthetic construct
  source 1..20: mol_type = other RNA
ggcatcagagaaccacagaa

SEQ ID NO: 1072 - RNA, 20 nt, synthetic construct
  source 1..20: mol_type = other RNA
tgacaccacactggcatcag

SEQ ID NO: 1073 - RNA, 20 nt, synthetic construct
  source 1..20: mol_type = other RNA
tactgccgtaaccctgatgg

SEQ ID NO: 1074 - RNA, 20 nt, synthetic construct
  source 1..20: mol_type = other RNA
tactgccgtaaccctgatgg

SEQ ID NO: 1075 - RNA, 20 nt, synthetic construct
  source 1..20: mol_type = other RNA
tactgccgtaaccctgatgg

SEQ ID NO: 1076 - RNA, 21 nt, synthetic construct
  source 1..21: mol_type = other RNA
tgccgtaaccctgatggtgac

SEQ ID NO: 1077 - RNA, 20 nt, synthetic construct
  source 1..20: mol_type = other RNA
agtactgccgtaaccctgat

SEQ ID NO: 1078 - RNA, 20 nt, synthetic construct
  source 1..20: mol_type = other RNA
actgccgtaaccctgatggt

SEQ ID NO: 1079 - RNA, 20 nt, synthetic construct
  source 1..20: mol_type = other RNA
cagtactgccgtaaccctga

SEQ ID NO: 1080 - RNA, 20 nt, synthetic construct
  source 1..20: mol_type = other RNA
tttcagtactgccgtaaccc

SEQ ID NO: 1081 - RNA, 20 nt, synthetic construct
  source 1..20: mol_type = other RNA
ggctccttccgaacaaggta

SEQ ID NO: 1082 - RNA, 20 nt, synthetic construct
  source 1..20: mol_type = other RNA
ggctccttccgaacaaggta

SEQ ID NO: 1083 - RNA, 20 nt, synthetic construct
  source 1..20: mol_type = other RNA
ggctccttccgaacaaggta

SEQ ID NO: 1084 - RNA, 20 nt, synthetic construct
  source 1..20: mol_type = other RNA
ggctccttccgaacaaggta

SEQ ID NO: 1085 - RNA, 20 nt, synthetic construct
  source 1..20: mol_type = other RNA
ggctccttccgaacaaggta

SEQ ID NO: 1086 - RNA, 20 nt, synthetic construct
  source 1..20: mol_type = other RNA
ggctccttccgaacaaggta

SEQ ID NO: 1087 - RNA, 20 nt, synthetic construct
  source 1..20: mol_type = other RNA
gctccttccgaacaaggtaa

SEQ ID NO: 1088 - RNA, 20 nt, synthetic construct
  source 1..20: mol_type = other RNA
gctccttccgaacaaggtaa

SEQ ID NO: 1089 - RNA, 20 nt, synthetic construct
  source 1..20: mol_type = other RNA
gctccttccgaacaaggtaa

SEQ ID NO: 1090 - RNA, 20 nt, synthetic construct
  source 1..20: mol_type = other RNA
gctccttccgaacaaggtaa

SEQ ID NO: 1091 - RNA, 20 nt, synthetic construct
  source 1..20: mol_type = other RNA
gctccttccgaacaaggtaa

SEQ ID NO: 1092 - RNA, 20 nt, synthetic construct
  source 1..20: mol_type = other RNA
gctccttccgaacaaggtaa

SEQ ID NO: 1093 - RNA, 21 nt, synthetic construct
  source 1..21: mol_type = other RNA
aggctccttccgaacaaggta

SEQ ID NO: 1094 - RNA, 21 nt, synthetic construct
  source 1..21: mol_type = other RNA
aggctccttccgaacaaggta

SEQ ID NO: 1095 - RNA, 20 nt, synthetic construct
  source 1..20: mol_type = other RNA
ctagaggctccttccgaaca

SEQ ID NO: 1096 - RNA, 20 nt, synthetic construct
  source 1..20: mol_type = other RNA
ctagaggctccttccgaaca

SEQ ID NO: 1097 - RNA, 20 nt, synthetic construct
  source 1..20: mol_type = other RNA
tagaggctccttccgaacaa

SEQ ID NO: 1098 - RNA, 20 nt, synthetic construct
  source 1..20: mol_type = other RNA
ccaagcctagaggctccttc

SEQ ID NO: 1099 - RNA, 20 nt, synthetic construct
  source 1..20: mol_type = other RNA
tccacggctgtttctgaaca

SEQ ID NO: 1100 - RNA, 20 nt, synthetic construct
  source 1..20: mol_type = other RNA
tccacggctgtttctgaaca

SEQ ID NO: 1101 - RNA, 20 nt, synthetic construct
  source 1..20: mol_type = other RNA
tccacggctgtttctgaaca

SEQ ID NO: 1102 - RNA, 21 nt, synthetic construct
  source 1..21: mol_type = other RNA
acgtccacggctgtttctgaa

SEQ ID NO: 1103 - RNA, 20 nt, synthetic construct
  source 1..20: mol_type = other RNA
ccacggctgtttctgaacaa

SEQ ID NO: 1104 - RNA, 20 nt, synthetic construct
  source 1..20: mol_type = other RNA
gacgtccacggctgtttctg

SEQ ID NO: 1105 - RNA, 20 nt, synthetic construct
  source 1..20: mol_type = other RNA
gcgacgtccacggctgtttc

SEQ ID NO: 1106 - RNA, 20 nt, synthetic construct
  source 1..20: mol_type = other RNA
tactcatttgggtagttttc

SEQ ID NO: 1107 - RNA, 20 nt, synthetic construct
  source 1..20: mol_type = other RNA
tactcatttgggtagttttc

SEQ ID NO: 1108 - RNA, 20 nt, synthetic construct
  source 1..20: mol_type = other RNA
tactcatttgggtagttttc

SEQ ID NO: 1109 - RNA, 20 nt, synthetic construct
  source 1..20: mol_type = other RNA
actcatttgggtagttttct

SEQ ID NO: 1110 - RNA, 20 nt, synthetic construct
  source 1..20: mol_type = other RNA
actcatttgggtagttttct

SEQ ID NO: 1111 - RNA, 20 nt, synthetic construct
  source 1..20: mol_type = other RNA
actcatttgggtagttttct

SEQ ID NO: 1112 - RNA, 20 nt, synthetic construct
  source 1..20: mol_type = other RNA
ctcatttgggtagttttctg

SEQ ID NO: 1113 - RNA, 20 nt, synthetic construct
  source 1..20: mol_type = other RNA
ctcatttgggtagttttctg

SEQ ID NO: 1114 - RNA, 20 nt, synthetic construct
  source 1..20: mol_type = other RNA
ctcatttgggtagttttctg

SEQ ID NO: 1115 - RNA, 21 nt, synthetic construct
  source 1..21: mol_type = other RNA
atactcatttgggtagttttc

SEQ ID NO: 1116 - RNA, 20 nt, synthetic construct
  source 1..20: mol_type = other RNA
tcatttgggtagttttctgg

SEQ ID NO: 1117 - RNA, 20 nt, synthetic construct
  source 1..20: mol_type = other RNA
agtaacagtggttgccttct

SEQ ID NO: 1118 - RNA, 20 nt, synthetic construct
  source 1..20: mol_type = other RNA
agtaacagtggttgccttct

SEQ ID NO: 1119 - RNA, 20 nt, synthetic construct
  source 1..20: mol_type = other RNA
agtaacagtggttgccttct

SEQ ID NO: 1120 - RNA, 20 nt, synthetic construct
  source 1..20: mol_type = other RNA
agtaacagtggttgccttct

SEQ ID NO: 1121 - RNA, 20 nt, synthetic construct
  source 1..20: mol_type = other RNA
ctgcgtctgagcattgcgtc

SEQ ID NO: 1122 - RNA, 20 nt, synthetic construct
  source 1..20: mol_type = other RNA
ctgcgtctgagcattgcgtc

SEQ ID NO: 1123 - RNA, 20 nt, synthetic construct
  source 1..20: mol_type = other RNA
ctgcgtctgagcattgcgtc

SEQ ID NO: 1124 - RNA, 21 nt, synthetic construct
  source 1..21: mol_type = other RNA
cttctgcgtctgagcattgcg

SEQ ID NO: 1125 - RNA, 20 nt, synthetic construct
  source 1..20: mol_type = other RNA
ccttctgcgtctgagcattg

SEQ ID NO: 1126 - RNA, 21 nt, synthetic construct
  source 1..21: mol_type = other RNA
atgtgcctcggtaactctgtc

SEQ ID NO: 1127 - RNA, 21 nt, synthetic construct
  source 1..21: mol_type = other RNA
tgcctcggtaactctgtccat

SEQ ID NO: 1128 - RNA, 21 nt, synthetic construct
  source 1..21: mol_type = other RNA
ctcggtaactctgtccataat

SEQ ID NO: 1129 - RNA, 20 nt, synthetic construct
  source 1..20: mol_type = other RNA
ctcggtaactctgtccataa

SEQ ID NO: 1130 - RNA, 20 nt, synthetic construct
  source 1..20: mol_type = other RNA
ggtaatggccagagttatcg

SEQ ID NO: 1131 - RNA, 20 nt, synthetic construct
  source 1..20: mol_type = other RNA
gtaatggccagagttatcga

SEQ ID NO: 1132 - RNA, 20 nt, synthetic construct
  source 1..20: mol_type = other RNA
aatggccagagttatcgagg

SEQ ID NO: 1133 - RNA, 20 nt, synthetic construct
  source 1..20: mol_type = other RNA
atggtaatggccagagttat

SEQ ID NO: 1134 - RNA, 20 nt, synthetic construct
  source 1..20: mol_type = other RNA
cgtccctccgaatgttattc

SEQ ID NO: 1135 - RNA, 20 nt, synthetic construct
  source 1..20: mol_type = other RNA
cgtccctccgaatgttattc

SEQ ID NO: 1136 - RNA, 20 nt, synthetic construct
  source 1..20: mol_type = other RNA
cgtccctccgaatgttattc

SEQ ID NO: 1137 - RNA, 20 nt, synthetic construct
  source 1..20: mol_type = other RNA
gtccctccgaatgttattct

SEQ ID NO: 1138 - RNA, 20 nt, synthetic construct
  source 1..20: mol_type = other RNA
gtccctccgaatgttattct

SEQ ID NO: 1139 - RNA, 20 nt, synthetic construct
  source 1..20: mol_type = other RNA
gtccctccgaatgttattct

SEQ ID NO: 1140 - RNA, 20 nt, synthetic construct
  source 1..20: mol_type = other RNA
gtgatggacagagttatcga

SEQ ID NO: 1141 - RNA, 20 nt, synthetic construct
  source 1..20: mol_type = other RNA
tggacagagttatcgaggca

SEQ ID NO: 1142 - RNA, 20 nt, synthetic construct
  source 1..20: mol_type = other RNA
ggtgatggacagagttatcg

SEQ ID NO: 1143 - RNA, 20 nt, synthetic construct
  source 1..20: mol_type = other RNA
gaggtgatggacagagttat

SEQ ID NO: 1144 - RNA, 20 nt, synthetic construct
  source 1..20: mol_type = other RNA
acacactttctgggcactgc

SEQ ID NO: 1145 - RNA, 20 nt, synthetic construct
  source 1..20: mol_type = other RNA
acacactttctgggcactgc

SEQ ID NO: 1146 - RNA, 20 nt, synthetic construct
  source 1..20: mol_type = other RNA
acacactttctgggcactgc

SEQ ID NO: 1147 - RNA, 20 nt, synthetic construct
  source 1..20: mol_type = other RNA
gggacacactttctgggcac

SEQ ID NO: 1148 - RNA, 20 nt, synthetic construct
  source 1..20: mol_type = other RNA
gggacacactttctgggcac

SEQ ID NO: 1149 - RNA, 20 nt, synthetic construct
  source 1..20: mol_type = other RNA
gggacacactttctgggcac

SEQ ID NO: 1150 - RNA, 20 nt, synthetic construct
  source 1..20: mol_type = other RNA
gggacacactttctgggcac

SEQ ID NO: 1151 - RNA, 20 nt, synthetic construct
  source 1..20: mol_type = other RNA
gggattgggacacactttct

SEQ ID NO: 1152 - RNA, 20 nt, synthetic construct
  source 1..20: mol_type = other RNA
ggattgggacacactttctg

SEQ ID NO: 1153 - RNA, 20 nt, synthetic construct
  source 1..20: mol_type = other RNA
attgggacacactttctggg

SEQ ID NO: 1154 - RNA, 20 nt, synthetic construct
  source 1..20: mol_type = other RNA
tgggattgggacacactttc

SEQ ID NO: 1155 - RNA, 20 nt, synthetic construct
  source 1..20: mol_type = other RNA
atgcctcgccctgcttcggc

SEQ ID NO: 1156 - RNA, 20 nt, synthetic construct
  source 1..20: mol_type = other RNA
atgcctcgccctgcttcggc

SEQ ID NO: 1157 - RNA, 20 nt, synthetic construct
  source 1..20: mol_type = other RNA
atgcctcgccctgcttcggc

SEQ ID NO: 1158 - RNA, 20 nt, synthetic construct
  source 1..20: mol_type = other RNA
tgcctcgccctgcttcggct

SEQ ID NO: 1159 - RNA, 20 nt, synthetic construct
  source 1..20: mol_type = other RNA
tgcctcgccctgcttcggct

SEQ ID NO: 1160 - RNA, 20 nt, synthetic construct
  source 1..20: mol_type = other RNA
cctcgccctgcttcggctgg

SEQ ID NO: 1161 - RNA, 20 nt, synthetic construct
  source 1..20: mol_type = other RNA
cctcgccctgcttcggctgg

SEQ ID NO: 1162 - RNA, 20 nt, synthetic construct
  source 1..20: mol_type = other RNA
cctcgccctgcttcggctgg

SEQ ID NO: 1163 - RNA, 21 nt, synthetic construct
  source 1..21: mol_type = other RNA
ctcgccctgcttcggctggcg

SEQ ID NO: 1164 - RNA, 20 nt, synthetic construct
  source 1..20: mol_type = other RNA
tcgccctgcttcggctggcg

SEQ ID NO: 1165 - RNA, 20 nt, synthetic construct
  source 1..20: mol_type = other RNA
ggcaatgcctcgccctgctt

SEQ ID NO: 1166 - RNA, 20 nt, synthetic construct
  source 1..20: mol_type = other RNA
ggtcactcccacccgaatac

SEQ ID NO: 1167 - RNA, 20 nt, synthetic construct
  source 1..20: mol_type = other RNA
ggtcactcccacccgaatac

SEQ ID NO: 1168 - RNA, 20 nt, synthetic construct
  source 1..20: mol_type = other RNA
tcgggtcactcccacccgaa

SEQ ID NO: 1169 - RNA, 20 nt, synthetic construct
  source 1..20: mol_type = other RNA
aaaatcgggtcactcccacc

SEQ ID NO: 1170 - RNA, 20 nt, synthetic construct
  source 1..20: mol_type = other RNA
tggatttcggcagtagttct

SEQ ID NO: 1171 - RNA, 20 nt, synthetic construct
  source 1..20: mol_type = other RNA
tggatttcggcagtagttct

SEQ ID NO: 1172 - RNA, 20 nt, synthetic construct
  source 1..20: mol_type = other RNA
tggatttcggcagtagttct

SEQ ID NO: 1173 - RNA, 21 nt, synthetic construct
  source 1..21: mol_type = other RNA
atctggatttcggcagtagtt

SEQ ID NO: 1174 - RNA, 20 nt, synthetic construct
  source 1..20: mol_type = other RNA
gaacaaagacgtacgcattt

SEQ ID NO: 1175 - RNA, 20 nt, synthetic construct
  source 1..20: mol_type = other RNA
gaacaaagacgtacgcattt

SEQ ID NO: 1176 - RNA, 20 nt, synthetic construct
  source 1..20: mol_type = other RNA
gaacaaagacgtacgcattt

SEQ ID NO: 1177 - RNA, 21 nt, synthetic construct
  source 1..21: mol_type = other RNA
aaagaacaaagacgtacgcat

SEQ ID NO: 1178 - RNA, 21 nt, synthetic construct
  source 1..21: mol_type = other RNA
gaacaaagacgtacgcatttg

SEQ ID NO: 1179 - RNA, 20 nt, synthetic construct
  source 1..20: mol_type = other RNA
aacaaagacgtacgcatttg

SEQ ID NO: 1180 - RNA, 20 nt, synthetic construct
  source 1..20: mol_type = other RNA
aaagacgtacgcatttgggt

SEQ ID NO: 1181 - RNA, 20 nt, synthetic construct
  source 1..20: mol_type = other RNA
agaacaaagacgtacgcatt

SEQ ID NO: 1182 - RNA, 20 nt, synthetic construct
  source 1..20: mol_type = other RNA
taacaccaaggactaatctc

SEQ ID NO: 1183 - RNA, 20 nt, synthetic construct
  source 1..20: mol_type = other RNA
taacaccaaggactaatctc

SEQ ID NO: 1184 - RNA, 20 nt, synthetic construct
  source 1..20: mol_type = other RNA
taacaccaaggactaatctc

SEQ ID NO: 1185 - RNA, 20 nt, synthetic construct
  source 1..20: mol_type = other RNA
taacaccaaggactaatctc

SEQ ID NO: 1186 - RNA, 20 nt, synthetic construct
  source 1..20: mol_type = other RNA
gatccatggtataacaccaa

SEQ ID NO: 1187 - RNA, 20 nt, synthetic construct
  source 1..20: mol_type = other RNA
gcgatgctcagacacagaag

SEQ ID NO: 1188 - RNA, 20 nt, synthetic construct
  source 1..20: mol_type = other RNA
gcgatgctcagacacagaag

SEQ ID NO: 1189 - RNA, 20 nt, synthetic construct
  source 1..20: mol_type = other RNA
gcgatgctcagacacagaag

SEQ ID NO: 1190 - RNA, 21 nt, synthetic construct
  source 1..21: mol_type = other RNA
atgctcagacacagaagggac

SEQ ID NO: 1191 - RNA, 20 nt, synthetic construct
  source 1..20: mol_type = other RNA
tgctcagacacagaagggac

SEQ ID NO: 1192 - RNA, 20 nt, synthetic construct
  source 1..20: mol_type = other RNA
cgatgctcagacacagaagg

SEQ ID NO: 1193 - RNA, 20 nt, synthetic construct
  source 1..20: mol_type = other RNA
acgcgatgctcagacacaga

SEQ ID NO: 1194 - RNA, 20 nt, synthetic construct
  source 1..20: mol_type = other RNA
cgcgatgctcagacacagaa

SEQ ID NO: 1195 - RNA, 20 nt, synthetic construct
  source 1..20: mol_type = other RNA
ctcagacacagaagggactg

SEQ ID NO: 1196 - RNA, 20 nt, synthetic construct
  source 1..20: mol_type = other RNA
ctgacgcgatgctcagacac

SEQ ID NO: 1197 - RNA, 20 nt, synthetic construct
  source 1..20: mol_type = other RNA
aacaaggagctgggcttcct

SEQ ID NO: 1198 - RNA, 20 nt, synthetic construct
  source 1..20: mol_type = other RNA
aacaaggagctgggcttcct

SEQ ID NO: 1199 - RNA, 20 nt, synthetic construct
  source 1..20: mol_type = other RNA
aacaaggagctgggcttcct

SEQ ID NO: 1200 - RNA, 20 nt, synthetic construct
  source 1..20: mol_type = other RNA
caaggagctgggcttccttg

SEQ ID NO: 1201 - RNA, 20 nt, synthetic construct
  source 1..20: mol_type = other RNA
caaggagctgggcttccttg

SEQ ID NO: 1202 - RNA, 20 nt, synthetic construct
  source 1..20: mol_type = other RNA
caaggagctgggcttccttg

SEQ ID NO: 1203 - RNA, 20 nt, synthetic construct
  source 1..20: mol_type = other RNA
cattctcaataacaaggagc

SEQ ID NO: 1204 - RNA, 20 nt, synthetic construct
  source 1..20: mol_type = other RNA
attctcaataacaaggagct

SEQ ID NO: 1205 - RNA, 20 nt, synthetic construct
  source 1..20: mol_type = other RNA
tcttacctggcaactgtcag

SEQ ID NO: 1206 - RNA, 20 nt, synthetic construct
  source 1..20: mol_type = other RNA
tcttacctggcaactgtcag

SEQ ID NO: 1207 - RNA, 20 nt, synthetic construct
  source 1..20: mol_type = other RNA
tcttacctggcaactgtcag

SEQ ID NO: 1208 - RNA, 20 nt, synthetic construct
  source 1..20: mol_type = other RNA
tttcttacctggcaactgtc

SEQ ID NO: 1209 - RNA, 20 nt, synthetic construct
  source 1..20: mol_type = other RNA
gtgtctatgctcgtgtttca

SEQ ID NO: 1210 - RNA, 20 nt, synthetic construct
  source 1..20: mol_type = other RNA
gtgtctatgctcgtgtttca

SEQ ID NO: 1211 - RNA, 20 nt, synthetic construct
  source 1..20: mol_type = other RNA
gtgtctatgctcgtgtttca

SEQ ID NO: 1212 - RNA, 21 nt, synthetic construct
  source 1..21: mol_type = other RNA
ctggtgtctatgctcgtgttt

SEQ ID NO: 1213 - RNA, 20 nt, synthetic construct
  source 1..20: mol_type = other RNA
tgtctatgctcgtgtttcaa

SEQ ID NO: 1214 - RNA, 100 nt, synthetic construct
  source 1..100: mol_type = other RNA
aaaacaccaagggcctgtatgttttagagctagaaatagcaagttaaaataaggctagtccgttatcaacttgaaaaagtggcaccgagtcggtgctttt

SEQ ID NO: 1215 - RNA, 100 nt, synthetic construct
  source 1..100: mol_type = other RNA
aaacaccaagggcctgtatcgttttagagctagaaatagcaagttaaaataaggctagtccgttatcaacttgaaaaagtggcaccgagtcggtgctttt

SEQ ID NO: 1216 - RNA, 100 nt, synthetic construct
  source 1..100: mol_type = other RNA
aaacgtacttcttcaagcaggttttagagctagaaatagcaagttaaaataaggctagtccgttatcaacttgaaaaagtggcaccgagtcggtgctttt

SEQ ID NO: 1217 - RNA, 100 nt, synthetic construct; identical to SEQ ID NO: 1216
  source 1..100: mol_type = other RNA

SEQ ID NO: 1218 - RNA, 100 nt, synthetic construct
  source 1..100: mol_type = other RNA
aacacaggtacctttgggacgttttagagctagaaatagcaagttaaaataaggctagtccgttatcaacttgaaaaagtggcaccgagtcggtgctttt

SEQ ID NO: 1219 - RNA, 100 nt, synthetic construct
  source 1..100: mol_type = other RNA
aacaccaaggggctgccacagttttagagctagaaatagcaagttaaaataaggctagtccgttatcaacttgaaaaagtggcaccgagtcggtgctttt

SEQ ID NO: 1220 - RNA, 100 nt, synthetic construct
  source 1..100: mol_type = other RNA
aagccactggaaattccaaagttttagagctagaaatagcaagttaaaataaggctagtccgttatcaacttgaaaaagtggcaccgagtcggtgctttt

SEQ ID NO: 1221 - RNA, 100 nt, synthetic construct
  source 1..100: mol_type = other RNA
aaggcagtccattctgcatcgttttagagctagaaatagcaagttaaaataaggctagtccgttatcaacttgaaaaagtggcaccgagtcggtgctttt

SEQ ID NO: 1222 - RNA, 100 nt, synthetic construct
  source 1..100: mol_type = other RNA
aatttcttaccttgttcagagttttagagctagaaatagcaagttaaaataaggctagtccgttatcaacttgaaaaagtggcaccgagtcggtgctttt

SEQ ID NO: 1223 - RNA, 100 nt, synthetic construct
  source 1..100: mol_type = other RNA
acacaggtacctttgggactgttttagagctagaaatagcaagttaaaataaggctagtccgttatcaacttgaaaaagtggcaccgagtcggtgctttt

SEQ ID NO: 1224 - RNA, 100 nt, synthetic construct
  source 1..100: mol_type = other RNA
acagtccaggactgctaccagttttagagctagaaatagcaagttaaaataaggctagtccgttatcaacttgaaaaagtggcaccgagtcggtgctttt

SEQ ID NO: 1225 - RNA, 100 nt, synthetic construct; identical to SEQ ID NO: 771
  source 1..100: mol_type = other RNA

SEQ ID NO: 1226 - RNA, 100 nt, synthetic construct
  source 1..100: mol_type = other RNA
acgtacttcttcaagcagtggttttagagctagaaatagcaagttaaaataaggctagtccgttatcaacttgaaaaagtggcaccgagtcggtgctttt

SEQ ID NO: 1227 - RNA, 100 nt, synthetic construct; identical to SEQ ID NO: 1226
  source 1..100: mol_type = other RNA

SEQ ID NO: 1228 - RNA, 100 nt, synthetic construct
  source 1..100: mol_type = other RNA
agcccagctccttgttattggttttagagctagaaatagcaagttaaaataaggctagtccgttatcaacttgaaaaagtggcaccgagtcggtgctttt

SEQ ID NO: 1229 - RNA, 100 nt, synthetic construct
  source 1..100: mol_type = other RNA
aggatgctgtggcacaaggtgttttagagctagaaatagcaagttaaaataaggctagtccgttatcaacttgaaaaagtggcaccgagtcggtgctttt

SEQ ID NO: 1230 - RNA, 100 nt, synthetic construct
  source 1..100: mol_type = other RNA
aggcctgtaaggaaagtattgttttagagctagaaatagcaagttaaaataaggctagtccgttatcaacttgaaaaagtggcaccgagtcggtgctttt

SEQ ID NO: 1231 - RNA, 100 nt, synthetic construct
  source 1..100: mol_type = other RNA
agtactcccacctcacacacgttttagagctagaaatagcaagttaaaataaggctagtccgttatcaacttgaaaaagtggcaccgagtcggtgctttt

SEQ ID NO: 1232 - RNA, 100 nt, synthetic construct
  source 1..100: mol_type = other RNA
agtgctgaaattaaaacagagttttagagctagaaatagcaagttaaaataaggctagtccgttatcaacttgaaaaagtggcaccgagtcggtgctttt

SEQ ID NO: 1233 - RNA, 100 nt, synthetic construct
  source 1..100: mol_type = other RNA
atgtcaatcttggtcatccagttttagagctagaaatagcaagttaaaataaggctagtccgttatcaacttgaaaaagtggcaccgagtcggtgctttt

SEQ ID NO: 1234 - RNA, 100 nt, synthetic construct
  source 1..100: mol_type = other RNA
attatggacagagttaccgagttttagagctagaaatagcaagttaaaataaggctagtccgttatcaacttgaaaaagtggcaccgagtcggtgctttt

SEQ ID NO: 1235 - RNA, 100 nt, synthetic construct
  source 1..100: mol_type = other RNA
cacacaagcagatattgcctgttttagagctagaaatagcaagttaaaataaggctagtccgttatcaacttgaaaaagtggcaccgagtcggtgctttt

SEQ ID NO: 1236 - RNA, 100 nt, synthetic construct
  source 1..100: mol_type = other RNA
caccagcatagtcggaccccgttttagagctagaaatagcaagttaaaataaggctagtccgttatcaacttgaaaaagtggcaccgagtcggtgctttt

SEQ ID NO: 1237 - RNA, 100 nt, synthetic construct
  source 1..100: mol_type = other RNA
cagtactcccacctcacacagttttagagctagaaatagcaagttaaaataaggctagtccgttatcaacttgaaaaagtggcaccgagtcggtgctttt

SEQ ID NO: 1238 - RNA, 100 nt, synthetic construct
  source 1..100: mol_type = other RNA
catcaacataataggaccacgttttagagctagaaatagcaagttaaaataaggctagtccgttatcaacttgaaaaagtggcaccgagtcggtgctttt

SEQ ID NO: 1239 - RNA, 100 nt, synthetic construct
  source 1..100: mol_type = other RNA
catccaggttccaagcctaggttttagagctagaaatagcaagttaaaataaggctagtccgttatcaacttgaaaaagtggcaccgagtcggtgctttt

SEQ ID NO: 1240 - RNA, 100 nt, synthetic construct
  source 1..100: mol_type = other RNA
ccaaacctagaaagaaaacagttttagagctagaaatagcaagttaaaataaggctagtccgttatcaacttgaaaaagtggcaccgagtcggtgctttt

SEQ ID NO: 1241 - RNA, 100 nt, synthetic construct
  source 1..100: mol_type = other RNA
cctgcccatttatttgtcccgttttagagctagaaatagcaagttaaaataaggctagtccgttatcaacttgaaaaagtggcaccgagtcggtgctttt

SEQ ID NO: 1242 - RNA, 100 nt, synthetic construct
  source 1..100: mol_type = other RNA
cgatgccaatgtggtgtcatgttttagagctagaaatagcaagttaaaataaggctagtccgttatcaacttgaaaaagtggcaccgagtcggtgctttt

SEQ ID NO: 1243 - RNA, 100 nt, synthetic construct
  source 1..100: mol_type = other RNA
cggcagtgctaccatggtaagttttagagctagaaatagcaagttaaaataaggctagtccgttatcaacttgaaaaagtggcaccgagtcggtgctttt

SEQ ID NO: 1244 - RNA, 100 nt, synthetic construct
  source 1..100: mol_type = other RNA
ctcccacctcacacacggatgttttagagctagaaatagcaagttaaaataaggctagtccgttatcaacttgaaaaagtggcaccgagtcggtgctttt

SEQ ID NO: 1245 - RNA, 100 nt, synthetic construct
  source 1..100: mol_type = other RNA
ctgacacaatgcctggtgacgttttagagctagaaatagcaagttaaaataaggctagtccgttatcaacttgaaaaagtggcaccgagtcggtgctttt

SEQ ID NO: 1246 - RNA, 100 nt, synthetic construct
  source 1..100: mol_type = other RNA
ctgacacaatgctcagaaacgttttagagctagaaatagcaagttaaaataaggctagtccgttatcaacttgaaaaagtggcaccgagtcggtgctttt

SEQ ID NO: 1247 - RNA, 100 nt, synthetic construct
  source 1..100: mol_type = other RNA
ctgacacgatgctcagatgcgttttagagctagaaatagcaagttaaaataaggctagtccgttatcaacttgaaaaagtggcaccgagtcggtgctttt

SEQ ID NO: 1248 - RNA, 100 nt, synthetic construct
  source 1..100: mol_type = other RNA
ctgacgcaatgtccagtgatgttttagagctagaaatagcaagttaaaataaggctagtccgttatcaacttgaaaaagtggcaccgagtcggtgctttt

SEQ ID NO: 1249 - RNA, 100 nt, synthetic construct; identical to SEQ ID NO: 774
  source 1..100: mol_type = other RNA

SEQ ID NO: 1250 - RNA, 100 nt, synthetic construct
  source 1..100: mol_type = other RNA
ctgcccatttatttgtccctgttttagagctagaaatagcaagttaaaataaggctagtccgttatcaacttgaaaaagtggcaccgagtcggtgctttt

SEQ ID NO: 1251 - RNA, 100 nt, synthetic construct
  source 1..100: mol_type = other RNA
ctgccgaaatccagatcctggttttagagctagaaatagcaagttaaaataaggctagtccgttatcaacttgaaaaagtggcaccgagtcggtgctttt

SEQ ID NO: 1252 - RNA, 100 nt, synthetic construct
  source 1..100: mol_type = other RNA
ctgctaccgaggtgatggacgttttagagctagaaatagcaagttaaaataaggctagtccgttatcaacttgaaaaagtggcaccgagtcggtgctttt

SEQ ID NO: 1253 - RNA, 100 nt, synthetic construct
  source 1..100: mol_type = other RNA
ctggggtccaggactgctacgttttagagctagaaatagcaagttaaaataaggctagtccgttatcaacttgaaaaagtggcaccgagtcggtgctttt

SEQ ID NO: 1254 - RNA, 100 nt, synthetic construct
  source 1..100: mol_type = other RNA
ctgtcaatcttggtcatctagttttagagctagaaatagcaagttaaaataaggctagtccgttatcaacttgaaaaagtggcaccgagtcggtgctttt

SEQ ID NO: 1255 - RNA, 100 nt, synthetic construct
  source 1..100: mol_type = other RNA
ctgtcaccctaaacagaggtgttttagagctagaaatagcaagttaaaataaggctagtccgttatcaacttgaaaaagtggcaccgagtcggtgctttt

SEQ ID NO: 1256 - RNA, 100 nt, synthetic construct
  source 1..100: mol_type = other RNA
ctgtttagggtgacagtggagttttagagctagaaatagcaagttaaaataaggctagtccgttatcaacttgaaaaagtggcaccgagtcggtgctttt

SEQ ID NO: 1257 - RNA, 100 nt, synthetic construct
  source 1..100: mol_type = other RNA
gaaatggacagagttatcaagttttagagctagaaatagcaagttaaaataaggctagtccgttatcaacttgaaaaagtggcaccgagtcggtgctttt

SEQ ID NO: 1258 - RNA, 100 nt, synthetic construct
  source 1..100: mol_type = other RNA
gaacaaggtaagaagtctctgttttagagctagaaatagcaagttaaaataaggctagtccgttatcaacttgaaaaagtggcaccgagtcggtgctttt

SEQ ID NO: 1259 - RNA, 100 nt, synthetic construct
  source 1..100: mol_type = other RNA
gaagcccagctccttgttatgttttagagctagaaatagcaagttaaaataaggctagtccgttatcaacttgaaaaagtggcaccgagtcggtgctttt

SEQ ID NO: 1260 - RNA, 100 nt, synthetic construct
  source 1..100: mol_type = other RNA
gacttcctaccttcttcagagttttagagctagaaatagcaagttaaaataaggctagtccgttatcaacttgaaaaagtggcaccgagtcggtgctttt

SEQ ID NO: 1261 - RNA, 100 nt, synthetic construct
  source 1..100: mol_type = other RNA
gacttcttaccttgttcagagttttagagctagaaatagcaagttaaaataaggctagtccgttatcaacttgaaaaagtggcaccgagtcggtgctttt

SEQ ID NO: 1262 - RNA, 100 nt, synthetic construct
  source 1..100: mol_type = other RNA
gagcaaagccatgtggtccagttttagagctagaaatagcaagttaaaataaggctagtccgttatcaacttgaaaaagtggcaccgagtcggtgctttt

SEQ ID NO: 1263 - RNA, 100 nt, synthetic construct
  source 1..100: mol_type = other RNA
gagcaaagccccacagtccagttttagagctagaaatagcaagttaaaataaggctagtccgttatcaacttgaaaaagtggcaccgagtcggtgctttt

SEQ ID NO: 1264 - RNA, 100 nt, synthetic construct
  source 1..100: mol_type = other RNA
gagcaaagccccggggtccagttttagagctagaaatagcaagttaaaataaggctagtccgttatcaacttgaaaaagtggcaccgagtcggtgctttt

SEQ ID NO: 1265 - RNA, 100 nt, synthetic construct
  source 1..100: mol_type = other RNA
gaggatgctgtggcacaagggttttagagctagaaatagcaagttaaaataaggctagtccgttatcaacttgaaaaagtggcaccgagtcggtgctttt

SEQ ID NO: 1266 - RNA, 100 nt, synthetic construct
  source 1..100: mol_type = other RNA
gccacagcatcctcttcattgttttagagctagaaatagcaagttaaaataaggctagtccgttatcaacttgaaaaagtggcaccgagtcggtgctttt

SEQ ID NO: 1267 - RNA, 100 nt, synthetic construct
  source 1..100: mol_type = other RNA
gctccttaccttgttcagaagttttagagctagaaatagcaagttaaaataaggctagtccgttatcaacttgaaaaagtggcaccgagtcggtgctttt

SEQ ID NO: 1268 - RNA, 100 nt, synthetic construct; identical to SEQ ID NO: 1267
  source 1..100: mol_type = other RNA

SEQ ID NO: 1269 - RNA, 100 nt, synthetic construct
  source 1..100: mol_type = other RNA
gctgctaaaattaaaacagagttttagagctagaaatagcaagttaaaataaggctagtccgttatcaacttgaaaaagtggcaccgagtcggtgctttt

SEQ ID NO: 1270 - RNA, 100 nt, synthetic construct
  source 1..100: mol_type = other RNA
gcttcttaccttcttcagaagttttagagctagaaatagcaagttaaaataaggctagtccgttatcaacttgaaaaagtggcaccgagtcggtgctttt

SEQ ID NO: 1271 - RNA, 100 nt, synthetic construct; identical to SEQ ID NO: 1270
  source 1..100: mol_type = other RNA

SEQ ID NO: 1272 - RNA, 100 nt, synthetic construct
  source 1..100: mol_type = other RNA
ggagcaaagccccacagtccgttttagagctagaaatagcaagttaaaataaggctagtccgttatcaacttgaaaaagtggcaccgagtcggtgctttt

SEQ ID NO: 1273 - RNA, 100 nt, synthetic construct
  source 1..100: mol_type = other RNA
ggagcaaagccccggggtccgttttagagctagaaatagcaagttaaaataaggctagtccgttatcaacttgaaaaagtggcaccgagtcggtgctttt

SEQ ID NO: 1274 - RNA, 100 nt, synthetic construct
  source 1..100: mol_type = other RNA
ggatgctgtggcacaaggtggttttagagctagaaatagcaagttaaaataaggctagtccgttatcaacttgaaaaagtggcaccgagtcggtgctttt

SEQ ID NO: 1275 - RNA, 100 nt, synthetic construct
  source 1..100: mol_type = other RNA
ggcagtccattctgcatctggttttagagctagaaatagcaagttaaaataaggctagtccgttatcaacttgaaaaagtggcaccgagtcggtgctttt

SEQ ID NO: 1276 - RNA, 100 nt, synthetic construct
  source 1..100: mol_type = other RNA
ggctccttaccttgttcagagttttagagctagaaatagcaagttaaaataaggctagtccgttatcaacttgaaaaagtggcaccgagtcggtgctttt

SEQ ID NO: 1277 - RNA, 100 nt, synthetic construct
  source 1..100: mol_type = other RNA
ggcttcttaccttcttcagagttttagagctagaaatagcaagttaaaataaggctagtccgttatcaacttgaaaaagtggcaccgagtcggtgctttt

SEQ ID NO: 1278 - RNA, 100 nt, synthetic construct
  source 1..100: mol_type = other RNA
ggggtccaggactgctaccggttttagagctagaaatagcaagttaaaataaggctagtccgttatcaacttgaaaaagtggcaccgagtcggtgctttt

SEQ ID NO: 1279 - RNA, 100 nt, synthetic construct
  source 1..100: mol_type = other RNA
gggtgcaggagtgctaccacgttttagagctagaaatagcaagttaaaataaggctagtccgttatcaacttgaaaaagtggcaccgagtcggtgctttt

SEQ ID NO: 1280 - RNA, 100 nt, synthetic construct
  source 1..100: mol_type = other RNA
ggtgctgaaatgaaaagaaagttttagagctagaaatagcaagttaaaataaggctagtccgttatcaacttgaaaaagtggcaccgagtcggtgctttt

SEQ ID NO: 1281 - RNA, 100 nt, synthetic construct
  source 1..100: mol_type = other RNA
ggtgctgctaaaattaaaacgttttagagctagaaatagcaagttaaaataaggctagtccgttatcaacttgaaaaagtggcaccgagtcggtgctttt

SEQ ID NO: 1282 - RNA, 100 nt, synthetic construct
  source 1..100: mol_type = other RNA
gtcaccctaaacagaggtaggttttagagctagaaatagcaagttaaaataaggctagtccgttatcaacttgaaaaagtggcaccgagtcggtgctttt

SEQ ID NO: 1283 - RNA, 100 nt, synthetic construct
  source 1..100: mol_type = other RNA
gtcagtgctgaaattaaaacgttttagagctagaaatagcaagttaaaataaggctagtccgttatcaacttgaaaaagtggcaccgagtcggtgctttt

SEQ ID NO: 1284 - RNA, 100 nt, synthetic construct
  source 1..100: mol_type = other RNA
gtcatccaggttccaagcctgttttagagctagaaatagcaagttaaaataaggctagtccgttatcaacttgaaaaagtggcaccgagtcggtgctttt

SEQ ID NO: 1285 - RNA, 100 nt, synthetic construct
  source 1..100: mol_type = other RNA
gtccaggactgctaccgagggttttagagctagaaatagcaagttaaaataaggctagtccgttatcaacttgaaaaagtggcaccgagtcggtgctttt

SEQ ID NO: 1286 - RNA, 100 nt, synthetic construct; identical to SEQ ID NO: 760
  source 1..100: mol_type = other RNA

SEQ ID NO: 1287 - RNA, 100 nt, synthetic construct
  source 1..100: mol_type = other RNA
taacaccaaggggctgccacgttttagagctagaaatagcaagttaaaataaggctagtccgttatcaacttgaaaaagtggcaccgagtcggtgctttt

SEQ ID NO: 1288 - RNA, 100 nt, synthetic construct
  source 1..100: mol_type = other RNA
taacaccagggttgtttcccgttttagagctagaaatagcaagttaaaataaggctagtccgttatcaacttgaaaaagtggcaccgagtcggtgctttt

SEQ ID NO: 1289 - RNA, 100 nt, synthetic construct
  source 1..100: mol_type = other RNA
tacaggcctgccgtcatcacgttttagagctagaaatagcaagttaaaataaggctagtccgttatcaacttgaaaaagtggcaccgagtcggtgctttt

SEQ ID NO: 1290 - RNA, 100 nt, synthetic construct
  source 1..100: mol_type = other RNA
tcaccctaaacagaggtagggttttagagctagaaatagcaagttaaaataaggctagtccgttatcaacttgaaaaagtggcaccgagtcggtgctttt

SEQ ID NO: 1291 - RNA, 100 nt, synthetic construct
  source 1..100: mol_type = other RNA
tcatccaggttccaagcctagttttagagctagaaatagcaagttaaaataaggctagtccgttatcaacttgaaaaagtggcaccgagtcggtgctttt

SEQ ID NO: 1292 - RNA, 100 nt, synthetic construct
  source 1..100: mol_type = other RNA
tgaacaaggtaagaaatttggttttagagctagaaatagcaagttaaaataaggctagtccgttatcaacttgaaaaagtggcaccgagtcggtgctttt

SEQ ID NO: 1293 - RNA, 100 nt, synthetic construct
  source 1..100: mol_type = other RNA
tgaacaaggtaagaagtctcgttttagagctagaaatagcaagttaaaataaggctagtccgttatcaacttgaaaaagtggcaccgagtcggtgctttt

SEQ ID NO: 1294 - RNA, 100 nt, synthetic construct
  source 1..100: mol_type = other RNA
tgaacaaggtaaggagcctggttttagagctagaaatagcaagttaaaataaggctagtccgttatcaacttgaaaaagtggcaccgagtcggtgctttt

SEQ ID NO: 1295 - RNA, 100 nt, synthetic construct
  source 1..100: mol_type = other RNA
tgagcaaagccatgtggtccgttttagagctagaaatagcaagttaaaataaggctagtccgttatcaacttgaaaaagtggcaccgagtcggtgctttt

SEQ ID NO: 1296 - RNA, 100 nt, synthetic construct
  source 1..100: mol_type = other RNA
tgccgaaatccagatcctgtgttttagagctagaaatagcaagttaaaataaggctagtccgttatcaacttgaaaaagtggcaccgagtcggtgctttt

SEQ ID NO: 1297 - RNA, 100 nt, synthetic construct
  source 1..100: mol_type = other RNA
tgtcaccctaaacagaggtagttttagagctagaaatagcaagttaaaataaggctagtccgttatcaacttgaaaaagtggcaccgagtcggtgctttt

SEQ ID NO: 1298 - RNA, 100 nt, synthetic construct
  source 1..100: mol_type = other RNA
tgtttagggtgacagtggaggttttagagctagaaatagcaagttaaaataaggctagtccgttatcaacttgaaaaagtggcaccgagtcggtgctttt

SEQ ID NO: 1299 - RNA, 100 nt, synthetic construct
  source 1..100: mol_type = other RNA
ttaatttcagcactgactgagttttagagctagaaatagcaagttaaaataaggctagtccgttatcaacttgaaaaagtggcaccgagtcggtgctttt

SEQ ID NO: 1300 - RNA, 100 nt, synthetic construct
  source 1..100: mol_type = other RNA
ttcctaccttcttcagaagagttttagagctagaaatagcaagttaaaataaggctagtccgttatcaacttgaaaaagtggcaccgagtcggtgctttt

SEQ ID NO: 1301 - RNA, 100 nt, synthetic construct; identical to SEQ ID NO: 1300
  source 1..100: mol_type = other RNA

SEQ ID NO: 1302 - RNA, 100 nt, synthetic construct
  source 1..100: mol_type = other RNA
ttctacagactgtatgtttggttttagagctagaaatagcaagttaaaataaggctagtccgttatcaacttgaaaaagtggcaccgagtcggtgctttt

SEQ ID NO: 1303 - RNA, 100 nt, synthetic construct
  source 1..100: mol_type = other RNA
ttcttacctgcttcagaatggttttagagctagaaatagcaagttaaaataaggctagtccgttatcaacttgaaaaagtggcaccgagtcggtgctttt

SEQ ID NO: 1304 - RNA, 100 nt, synthetic construct; identical to SEQ ID NO: 1303
  source 1..100: mol_type = other RNA

SEQ ID NO: 1305 - RNA, 100 nt, synthetic construct
  source 1..100: mol_type = other RNA
ttcttaccttgttcaaaaaagttttagagctagaaatagcaagttaaaataaggctagtccgttatcaacttgaaaaagtggcaccgagtcggtgctttt

SEQ ID NO: 1306 - RNA, 100 nt, synthetic construct; identical to SEQ ID NO: 1305
  source 1..100: mol_type = other RNA

SEQ ID NO: 1307 - RNA, 100 nt, synthetic construct
  source 1..100: mol_type = other RNA
ttgaacaaggtaagaagttggttttagagctagaaatagcaagttaaaataaggctagtccgttatcaacttgaaaaagtggcaccgagtcggtgctttt

SEQ ID NO: 1308 - RNA, 100 nt, synthetic construct
  source 1..100: mol_type = other RNA
tttcagcaccaactgaaaacgttttagagctagaaatagcaagttaaaataaggctagtccgttatcaacttgaaaaagtggcaccgagtcggtgctttt

SEQ ID NO: 1309 - RNA, 100 nt, synthetic construct
  source 1..100: mol_type = other RNA
tttcagcaccacctgagaaagttttagagctagaaatagcaagttaaaataaggctagtccgttatcaacttgaaaaagtggcaccgagtcggtgctttt

SEQ ID NO: 1310 - RNA, 100 nt, synthetic construct
  source 1..100: mol_type = other RNA
tttctacagactgtatgtttgttttagagctagaaatagcaagttaaaataaggctagtccgttatcaacttgaaaaagtggcaccgagtcggtgctttt

SEQ ID NO: 1311 - RNA, 100 nt, synthetic construct
  source 1..100: mol_type = other RNA
ttttagcagcacctgagcaagttttagagctagaaatagcaagttaaaataaggctagtccgttatcaacttgaaaaagtggcaccgagtcggtgctttt

SEQ ID NO: 1312 - RNA, 100 nt, synthetic construct
  source 1..100: mol_type = other RNA
ttttctacagactgtatgttgttttagagctagaaatagcaagttaaaataaggctagtccgttatcaacttgaaaaagtggcaccgagtcggtgctttt

SEQ ID NO: 1313 - RNA, 100 nt, synthetic construct; identical to SEQ ID NO: 1214
  source 1..100: mol_type = other RNA

SEQ ID NO: 1314 - RNA, 100 nt, synthetic construct; identical to SEQ ID NO: 1215
  source 1..100: mol_type = other RNA

SEQ ID NO: 1315 - RNA, 100 nt, synthetic construct; identical to SEQ ID NO: 1216
  source 1..100: mol_type = other RNA

SEQ ID NO: 1316 - RNA, 100 nt, synthetic construct; identical to SEQ ID NO: 1218
  source 1..100: mol_type = other RNA

SEQ ID NO: 1317 - RNA, 100 nt, synthetic construct; identical to SEQ ID NO: 1219
  source 1..100: mol_type = other RNA

SEQ ID NO: 1318 - RNA, 100 nt, synthetic construct; identical to SEQ ID NO: 1220
  source 1..100: mol_type = other RNA

SEQ ID NO: 1319 - RNA, 100 nt, synthetic construct; identical to SEQ ID NO: 1221
  source 1..100: mol_type = other RNA

SEQ ID NO: 1320 - RNA, 100 nt, synthetic construct; identical to SEQ ID NO: 1222
  source 1..100: mol_type = other RNA

SEQ ID NO: 1321 - RNA, 100 nt, synthetic construct; identical to SEQ ID NO: 1223
  source 1..100: mol_type = other RNA

SEQ ID NO: 1322 - RNA, 100 nt, synthetic construct; identical to SEQ ID NO: 1224
  source 1..100: mol_type = other RNA

SEQ ID NO: 1323 - RNA, 100 nt, synthetic construct; identical to SEQ ID NO: 771
  source 1..100: mol_type = other RNA

SEQ ID NO: 1324 - RNA, 100 nt, synthetic construct; identical to SEQ ID NO: 1226
  source 1..100: mol_type = other RNA

SEQ ID NO: 1325 - RNA, 100 nt, synthetic construct; identical to SEQ ID NO: 1228
  source 1..100: mol_type = other RNA

SEQ ID NO: 1326 - RNA, 100 nt, synthetic construct; identical to SEQ ID NO: 1229
  source 1..100: mol_type = other RNA

SEQ ID NO: 1327 - RNA, 100 nt, synthetic construct; identical to SEQ ID NO: 1230
  source 1..100: mol_type = other RNA

SEQ ID NO: 1328 - RNA, 100 nt, synthetic construct; identical to SEQ ID NO: 1231
  source 1..100: mol_type = other RNA

SEQ ID NO: 1329 - RNA, 100 nt, synthetic construct; identical to SEQ ID NO: 1232
  source 1..100: mol_type = other RNA

SEQ ID NO: 1330 - RNA, 100 nt, synthetic construct; identical to SEQ ID NO: 1233
  source 1..100: mol_type = other RNA

SEQ ID NO: 1331 - RNA, 100 nt, synthetic construct; identical to SEQ ID NO: 1234
  source 1..100: mol_type = other RNA

SEQ ID NO: 1332 - RNA, 100 nt, synthetic construct; identical to SEQ ID NO: 1235
  source 1..100: mol_type = other RNA

SEQ ID NO: 1333 - RNA, 100 nt, synthetic construct; identical to SEQ ID NO: 1236
  source 1..100: mol_type = other RNA

SEQ ID NO: 1334 - RNA, 100 nt, synthetic construct; identical to SEQ ID NO: 1237
  source 1..100: mol_type = other RNA

SEQ ID NO: 1335 - RNA, 100 nt, synthetic construct; identical to SEQ ID NO: 1238
  source 1..100: mol_type = other RNA

SEQ ID NO: 1336 - RNA, 100 nt, synthetic construct; identical to SEQ ID NO: 1239
  source 1..100: mol_type = other RNA

SEQ ID NO: 1337 - RNA, 100 nt, synthetic construct; identical to SEQ ID NO: 1240
  source 1..100: mol_type = other RNA

SEQ ID NO: 1338 - RNA, 100 nt, synthetic construct; identical to SEQ ID NO: 1241
  source 1..100: mol_type = other RNA

SEQ ID NO: 1339 - RNA, 100 nt, synthetic construct; identical to SEQ ID NO: 1242
  source 1..100: mol_type = other RNA

SEQ ID NO: 1340 - RNA, 100 nt, synthetic construct; identical to SEQ ID NO: 1243
  source 1..100: mol_type = other RNA

SEQ ID NO: 1341 - RNA, 100 nt, synthetic construct; identical to SEQ ID NO: 1244
  source 1..100: mol_type = other RNA

SEQ ID NO: 1342 - RNA, 100 nt, synthetic construct; identical to SEQ ID NO: 1245
  source 1..100: mol_type = other RNA

SEQ ID NO: 1343 - RNA, 100 nt, synthetic construct; identical to SEQ ID NO: 1246
  source 1..100: mol_type = other RNA

SEQ ID NO: 1344 - RNA, 100 nt, synthetic construct; identical to SEQ ID NO: 1247
  source 1..100: mol_type = other RNA

SEQ ID NO: 1345 - RNA, 100 nt, synthetic construct; identical to SEQ ID NO: 1248
  source 1..100: mol_type = other RNA

SEQ ID NO: 1346 - RNA, 100 nt, synthetic construct; identical to SEQ ID NO: 774
  source 1..100: mol_type = other RNA

SEQ ID NO: 1347 - RNA, 100 nt, synthetic construct; identical to SEQ ID NO: 1250
  source 1..100: mol_type = other RNA

SEQ ID NO: 1348 - RNA, 100 nt, synthetic construct; identical to SEQ ID NO: 1251
  source 1..100: mol_type = other RNA

SEQ ID NO: 1349 - RNA, 100 nt, synthetic construct; identical to SEQ ID NO: 1252
  source 1..100: mol_type = other RNA

SEQ ID NO: 1350 - RNA, 100 nt, synthetic construct; identical to SEQ ID NO: 1253
  source 1..100: mol_type = other RNA

SEQ ID NO: 1351 - RNA, 100 nt, synthetic construct; identical to SEQ ID NO: 1254
  source 1..100: mol_type = other RNA

SEQ ID NO: 1352 - RNA, 100 nt, synthetic construct; identical to SEQ ID NO: 1255
  source 1..100: mol_type = other RNA

SEQ ID NO: 1353 - RNA, 100 nt, synthetic construct; identical to SEQ ID NO: 1256
  source 1..100: mol_type = other RNA

SEQ ID NO: 1354 - RNA, 100 nt, synthetic construct; identical to SEQ ID NO: 1257
  source 1..100: mol_type = other RNA

SEQ ID NO: 1355 - RNA, 100 nt, synthetic construct; identical to SEQ ID NO: 1258
  source 1..100: mol_type = other RNA

SEQ ID NO: 1356 - RNA, 100 nt, synthetic construct; identical to SEQ ID NO: 1259
  source 1..100: mol_type = other RNA

SEQ ID NO: 1357 - RNA, 100 nt, synthetic construct; identical to SEQ ID NO: 1260
  source 1..100: mol_type = other RNA

SEQ ID NO: 1358 - RNA, 100 nt, synthetic construct; identical to SEQ ID NO: 1261
  source 1..100: mol_type = other RNA

SEQ ID NO: 1359 - RNA, 100 nt, synthetic construct; identical to SEQ ID NO: 1262
  source 1..100: mol_type = other RNA

SEQ ID NO: 1360 - RNA, 100 nt, synthetic construct; identical to SEQ ID NO: 1263
  source 1..100: mol_type = other RNA

SEQ ID NO: 1361 - RNA, 100 nt, synthetic construct; identical to SEQ ID NO: 1264
  source 1..100: mol_type = other RNA

SEQ ID NO: 1362 - RNA, 100 nt, synthetic construct; identical to SEQ ID NO: 1265
  source 1..100: mol_type = other RNA

SEQ ID NO: 1363 - RNA, 100 nt, synthetic construct; identical to SEQ ID NO: 1266
  source 1..100: mol_type = other RNA

SEQ ID NO: 1364 - RNA, 100 nt, synthetic construct; identical to SEQ ID NO: 1267
  source 1..100: mol_type = other RNA

SEQ ID NO: 1365 - RNA, 100 nt, synthetic construct; identical to SEQ ID NO: 1269
  source 1..100: mol_type = other RNA

SEQ ID NO: 1366 - RNA, 100 nt, synthetic construct; identical to SEQ ID NO: 1270
  source 1..100: mol_type = other RNA

SEQ ID NO: 1367 - RNA, 100 nt, synthetic construct; identical to SEQ ID NO: 1272
  source 1..100: mol_type = other RNA

SEQ ID NO: 1368 - RNA, 100 nt, synthetic construct; identical to SEQ ID NO: 1273
  source 1..100: mol_type = other RNA

SEQ ID NO: 1369 - RNA, 100 nt, synthetic construct; identical to SEQ ID NO: 1274
  source 1..100: mol_type = other RNA

SEQ ID NO: 1370 - RNA, 100 nt, synthetic construct; identical to SEQ ID NO: 1275
  source 1..100: mol_type = other RNA

SEQ ID NO: 1371 - RNA, 100 nt, synthetic construct; identical to SEQ ID NO: 1276
  source 1..100: mol_type = other RNA

SEQ ID NO: 1372 - RNA, 100 nt, synthetic construct; identical to SEQ ID NO: 1277
  source 1..100: mol_type = other RNA

SEQ ID NO: 1373 - RNA, 100 nt, synthetic construct; identical to SEQ ID NO: 1278
  source 1..100: mol_type = other RNA

SEQ ID NO: 1374 - RNA, 100 nt, synthetic construct; identical to SEQ ID NO: 1279
  source 1..100: mol_type = other RNA

SEQ ID NO: 1375 - RNA, 100 nt, synthetic construct; identical to SEQ ID NO: 1280
  source 1..100: mol_type = other RNA

SEQ ID NO: 1376 - RNA, 100 nt, synthetic construct; identical to SEQ ID NO: 1281
  source 1..100: mol_type = other RNA

SEQ ID NO: 1377 - RNA, 100 nt, synthetic construct; identical to SEQ ID NO: 1282
  source 1..100: mol_type = other RNA

SEQ ID NO: 1378 - RNA, 100 nt, synthetic construct; identical to SEQ ID NO: 1283
  source 1..100: mol_type = other RNA

SEQ ID NO: 1379 - RNA, 100 nt, synthetic construct; identical to SEQ ID NO: 1284
  source 1..100: mol_type = other RNA

SEQ ID NO: 1380 - RNA, 100 nt, synthetic construct; identical to SEQ ID NO: 1285
  source 1..100: mol_type = other RNA

SEQ ID NO: 1381 - RNA, 100 nt, synthetic construct; identical to SEQ ID NO: 760
  source 1..100: mol_type = other RNA

SEQ ID NO: 1382 - RNA, 100 nt, synthetic construct; identical to SEQ ID NO: 1287
  source 1..100: mol_type = other RNA

SEQ ID NO: 1383 - RNA, 100 nt, synthetic construct; identical to SEQ ID NO: 1288
  source 1..100: mol_type = other RNA

SEQ ID NO: 1384 - RNA, 100 nt, synthetic construct; identical to SEQ ID NO: 1289
  source 1..100: mol_type = other RNA

SEQ ID NO: 1385 - RNA, 100 nt, synthetic construct; identical to SEQ ID NO: 1290
  source 1..100: mol_type = other RNA

SEQ ID NO: 1386 - RNA, 100 nt, synthetic construct; identical to SEQ ID NO: 1291
  source 1..100: mol_type = other RNA

SEQ ID NO: 1387 - RNA, 100 nt, synthetic construct; identical to SEQ ID NO: 1292
  source 1..100: mol_type = other RNA

SEQ ID NO: 1388 - RNA, 100 nt, synthetic construct; identical to SEQ ID NO: 1293
  source 1..100: mol_type = other RNA

SEQ ID NO: 1389 - RNA, 100 nt, synthetic construct; identical to SEQ ID NO: 1294
  source 1..100: mol_type = other RNA

SEQ ID NO: 1390 - RNA, 100 nt, synthetic construct; identical to SEQ ID NO: 1295
  source 1..100: mol_type = other RNA

SEQ ID NO: 1391 - RNA, 100 nt, synthetic construct; identical to SEQ ID NO: 1296
  source 1..100: mol_type = other RNA

SEQ ID NO: 1392 - RNA, 100 nt, synthetic construct; identical to SEQ ID NO: 1297
  source 1..100: mol_type = other RNA

SEQ ID NO: 1393 - RNA, 100 nt, synthetic construct; identical to SEQ ID NO: 1298
  source 1..100: mol_type = other RNA

SEQ ID NO: 1394 - RNA, 100 nt, synthetic construct; identical to SEQ ID NO: 1299
  source 1..100: mol_type = other RNA

SEQ ID NO: 1395 - RNA, 100 nt, synthetic construct; identical to SEQ ID NO: 1300
  source 1..100: mol_type = other RNA

SEQ ID NO: 1396 - RNA, 100 nt, synthetic construct; identical to SEQ ID NO: 1302
  source 1..100: mol_type = other RNA

SEQ ID NO: 1397 - RNA, 100 nt, synthetic construct; identical to SEQ ID NO: 1303
  source 1..100: mol_type = other RNA

SEQ ID NO: 1398 - RNA, 100 nt, synthetic construct; identical to SEQ ID NO: 1305
  source 1..100: mol_type = other RNA

SEQ ID NO: 1399 - RNA, 100 nt, synthetic construct; identical to SEQ ID NO: 1307
  source 1..100: mol_type = other RNA

SEQ ID NO: 1400 - RNA, 100 nt, synthetic construct; identical to SEQ ID NO: 1308
  source 1..100: mol_type = other RNA

SEQ ID NO: 1401 - RNA, 100 nt, synthetic construct; identical to SEQ ID NO: 1309
  source 1..100: mol_type = other RNA

SEQ ID NO: 1402 - RNA, 100 nt, synthetic construct; identical to SEQ ID NO: 1310
  source 1..100: mol_type = other RNA

SEQ ID NO: 1403 - RNA, 100 nt, synthetic construct; identical to SEQ ID NO: 1311
  source 1..100: mol_type = other RNA

SEQ ID NO: 1404 - RNA, 100 nt, synthetic construct; identical to SEQ ID NO: 1312
  source 1..100: mol_type = other RNA

SEQ ID NO: 1405 - RNA, 100 nt, synthetic construct
  source 1..100: mol_type = other RNA
caggatccgcacagactccagttttagagctagaaatagcaagttaaaataaggctagtccgttatcaacttgaaaaagtggcaccgagtcggtgctttt

SEQ ID NO: 1406 - DNA, 23 bp, synthetic construct
  source 1..23: mol_type = other DNA
aaaacaccaagggcctgtatcgg

SEQ ID NO: 1407 - DNA, 23 bp, synthetic construct
  source 1..23: mol_type = other DNA
aaacaccaagggcctgtatcggc

SEQ ID NO: 1408 - DNA, 23 bp, synthetic construct
  source 1..23: mol_type = other DNA
aaacgtacttcttcaagcagtga

SEQ ID NO: 1409 - DNA, 23 bp, synthetic construct
  source 1..23: mol_type = other DNA
aaacgtacttcttcaagcagtga

SEQ ID NO: 1410 - DNA, 23 bp, synthetic construct
  source 1..23: mol_type = other DNA
aacacaggtacctttgggactgg

SEQ ID NO: 1411 - DNA, 23 bp, synthetic construct
  source 1..23: mol_type = other DNA
aacaccaaggggctgccacagga

SEQ ID NO: 1412 - DNA, 23 bp, synthetic construct
  source 1..23: mol_type = other DNA
aagccactggaaattccaaaaga

SEQ ID NO: 1413 - DNA, 23 bp, synthetic construct
  source 1..23: mol_type = other DNA
aaggcagtccattctgcatctga

SEQ ID NO: 1414 - DNA, 23 bp, synthetic construct
  source 1..23: mol_type = other DNA
aatttcttaccttgttcagaagg

SEQ ID NO: 1415 - DNA, 23 bp, synthetic construct
  source 1..23: mol_type = other DNA
acacaggtacctttgggactggc

SEQ ID NO: 1416 - DNA, 23 bp, synthetic construct
  source 1..23: mol_type = other DNA
acagtccaggactgctaccatgg

SEQ ID NO: 1417 - DNA, 23 bp, synthetic construct
  source 1..23: mol_type = other DNA
acgcgatgctcagacacagaagg

SEQ ID NO: 1418 - DNA, 23 bp, synthetic construct
  source 1..23: mol_type = other DNA
acgtacttcttcaagcagtgagc

SEQ ID NO: 1419 - DNA, 23 bp, synthetic construct
  source 1..23: mol_type = other DNA
acgtacttcttcaagcagtgagc

SEQ ID NO: 1420 - DNA, 23 bp, synthetic construct
  source 1..23: mol_type = other DNA
agcccagctccttgttattgaga

SEQ ID NO: 1421 - DNA, 23 bp, synthetic construct
  source 1..23: mol_type = other DNA
aggatgctgtggcacaaggtggg

SEQ ID NO: 1422 - DNA, 23 bp, synthetic construct
  source 1..23: mol_type = other DNA
aggcctgtaaggaaagtattagc

SEQ ID NO: 1423 - DNA, 23 bp, synthetic construct
  source 1..23: mol_type = other DNA
agtactcccacctcacacacgga

SEQ ID NO: 1424 - DNA, 23 bp, synthetic construct
  source 1..23: mol_type = other DNA
agtgctgaaattaaaacagaaga

SEQ ID NO: 1425 - DNA, 23 bp, synthetic construct
  source 1..23: mol_type = other DNA
atgtcaatcttggtcatccatga

SEQ ID NO: 1426 - DNA, 23 bp, synthetic construct
  source 1..23: mol_type = other DNA
attatggacagagttaccgaggc

SEQ ID NO: 1427 - DNA, 23 bp, synthetic construct
  source 1..23: mol_type = other DNA
cacacaagcagatattgccttgc

SEQ ID NO: 1428 - DNA, 23 bp, synthetic construct
  source 1..23: mol_type = other DNA
caccagcatagtcggaccccaga

SEQ ID NO: 1429 - DNA, 23 bp, synthetic construct
  source 1..23: mol_type = other DNA
cagtactcccacctcacacacgg

SEQ ID NO: 1430 - DNA, 23 bp, synthetic construct
  source 1..23: mol_type = other DNA
catcaacataataggaccacaga

SEQ ID NO: 1431 - DNA, 23 bp, synthetic construct
  source 1..23: mol_type = other DNA
catccaggttccaagcctagggc

SEQ ID NO: 1432 - DNA, 23 bp, synthetic construct
  source 1..23: mol_type = other DNA
ccaaacctagaaagaaaacatgc

SEQ ID NO: 1433 - DNA, 23 bp, synthetic construct
  source 1..23: mol_type = other DNA
cctgcccatttatttgtccctgg

SEQ ID NO: 1434 - DNA, 23 bp, synthetic construct
  source 1..23: mol_type = other DNA
cgatgccaatgtggtgtcataga

SEQ ID NO: 1435 - DNA, 23 bp, synthetic construct
  source 1..23: mol_type = other DNA
cggcagtgctaccatggtaatgg

SEQ ID NO: 1436 - DNA, 23 bp, synthetic construct
  source 1..23: mol_type = other DNA
ctcccacctcacacacggatcgg

SEQ ID NO: 1437 - DNA, 23 bp, synthetic construct
  source 1..23: mol_type = other DNA
ctgacacaatgcctggtgacaga

SEQ ID NO: 1438 - DNA, 23 bp, synthetic construct
  source 1..23: mol_type = other DNA
ctgacacaatgctcagaaacaga

SEQ ID NO: 1439 - DNA, 23 bp, synthetic construct
  source 1..23: mol_type = other DNA
ctgacacgatgctcagatgcaga

SEQ ID NO: 1440 - DNA, 23 bp, synthetic construct
  source 1..23: mol_type = other DNA
ctgacgcaatgtccagtgatgga

SEQ ID NO: 1441 - DNA, 23 bp, synthetic construct
  source 1..23: mol_type = other DNA
ctgacgcgatgctcagacacaga

SEQ ID NO: 1442 - DNA, 23 bp, synthetic construct
  source 1..23: mol_type = other DNA
ctgcccatttatttgtccctgga

SEQ ID NO: 1443 - DNA, 23 bp, synthetic construct
  source 1..23: mol_type = other DNA
ctgccgaaatccagatcctgtgg

SEQ ID NO: 1444 - DNA, 23 bp, synthetic construct
  source 1..23: mol_type = other DNA
ctgctaccgaggtgatggacaga

SEQ ID NO: 1445 - DNA, 23 bp, synthetic construct
  source 1..23: mol_type = other DNA
ctggggtccaggactgctaccga

SEQ ID NO: 1446 - DNA, 23 bp, synthetic construct
  source 1..23: mol_type = other DNA
ctgtcaatcttggtcatctatga

SEQ ID NO: 1447 - DNA, 23 bp, synthetic construct
  source 1..23: mol_type = other DNA
ctgtcaccctaaacagaggtagg

SEQ ID NO: 1448 - DNA, 23 bp, synthetic construct
  source 1..23: mol_type = other DNA
ctgtttagggtgacagtggaggg

SEQ ID NO: 1449 - DNA, 23 bp, synthetic construct
  source 1..23: mol_type = other DNA
gaaatggacagagttatcaaggc

SEQ ID NO: 1450 - DNA, 23 bp, synthetic construct
  source 1..23: mol_type = other DNA
gaacaaggtaagaagtctctggc

SEQ ID NO: 1451 - DNA, 23 bp, synthetic construct
  source 1..23: mol_type = other DNA
gaagcccagctccttgttattga

SEQ ID NO: 1452 - DNA, 23 bp, synthetic construct
  source 1..23: mol_type = other DNA
gacttcctaccttcttcagaaga

SEQ ID NO: 1453 - DNA, 23 bp, synthetic construct
  source 1..23: mol_type = other DNA
gacttcttaccttgttcagaagg

SEQ ID NO: 1454 - DNA, 23 bp, synthetic construct
  source 1..23: mol_type = other DNA
gagcaaagccatgtggtccagga

SEQ ID NO: 1455 - DNA, 23 bp, synthetic construct
  source 1..23: mol_type = other DNA
gagcaaagccccacagtccagga

SEQ ID NO: 1456 - DNA, 23 bp, synthetic construct
  source 1..23: mol_type = other DNA
gagcaaagccccggggtccagga

SEQ ID NO: 1457 - DNA, 23 bp, synthetic construct
  source 1..23: mol_type = other DNA
gaggatgctgtggcacaaggtgg

SEQ ID NO: 1458 - DNA, 23 bp, synthetic construct
  source 1..23: mol_type = other DNA
gccacagcatcctcttcatttga

SEQ ID NO: 1459 - DNA, 23 bp, synthetic construct
  source 1..23: mol_type = other DNA
gctccttaccttgttcagaagga

SEQ ID NO: 1460 - DNA, 23 bp, synthetic construct
  source 1..23: mol_type = other DNA
gctccttaccttgttcagaagga

SEQ ID NO: 1461 - DNA, 23 bp, synthetic construct
  source 1..23: mol_type = other DNA
gctgctaaaattaaaacagaaga

SEQ ID NO: 1462 - DNA, 23 bp, synthetic construct
  source 1..23: mol_type = other DNA
gcttcttaccttcttcagaagga

SEQ ID NO: 1463 - DNA, 23 bp, synthetic construct
  source 1..23: mol_type = other DNA
gcttcttaccttcttcagaagga

SEQ ID NO: 1464 - DNA, 23 bp, synthetic construct
  source 1..23: mol_type = other DNA
ggagcaaagccccacagtccagg

SEQ ID NO: 1465 - DNA, 23 bp, synthetic construct
  source 1..23: mol_type = other DNA
ggagcaaagccccggggtccagg

SEQ ID NO: 1466 - DNA, 23 bp, synthetic construct
  source 1..23: mol_type = other DNA
ggatgctgtggcacaaggtggga

SEQ ID NO: 1467 - DNA, 23 bp, synthetic construct
  source 1..23: mol_type = other DNA
ggcagtccattctgcatctgagc

SEQ ID NO: 1468 - DNA, 23 bp, synthetic construct
  source 1..23: mol_type = other DNA
ggctccttaccttgttcagaagg

SEQ ID NO: 1469 - DNA, 23 bp, synthetic construct
  source 1..23: mol_type = other DNA
ggcttcttaccttcttcagaagg

SEQ ID NO: 1470 - DNA, 23 bp, synthetic construct
  source 1..23: mol_type = other DNA
ggggtccaggactgctaccgagg

SEQ ID NO: 1471 - DNA, 23 bp, synthetic construct
  source 1..23: mol_type = other DNA
gggtgcaggagtgctaccacgga

SEQ ID NO: 1472 - DNA, 23 bp, synthetic construct
  source 1..23: mol_type = other DNA
ggtgctgaaatgaaaagaaaaga

SEQ ID NO: 1473 - DNA, 23 bp, synthetic construct
  source 1..23: mol_type = other DNA
ggtgctgctaaaattaaaacaga

SEQ ID NO: 1474 - DNA, 23 bp, synthetic construct
  source 1..23: mol_type = other DNA
gtcaccctaaacagaggtagggg

SEQ ID NO: 1475 - DNA, 23 bp, synthetic construct
  source 1..23: mol_type = other DNA
gtcagtgctgaaattaaaacaga

SEQ ID NO: 1476 - DNA, 23 bp, synthetic construct
  source 1..23: mol_type = other DNA
gtcatccaggttccaagcctagg

SEQ ID NO: 1477 - DNA, 23 bp, synthetic construct
  source 1..23: mol_type = other DNA
gtccaggactgctaccgaggtga

SEQ ID NO: 1478 - DNA, 23 bp, synthetic construct
  source 1..23: mol_type = other DNA
taacaccaaggactaatctcagc

SEQ ID NO: 1479 - DNA, 23 bp, synthetic construct
  source 1..23: mol_type = other DNA
taacaccaaggggctgccacagg

SEQ ID NO: 1480 - DNA, 23 bp, synthetic construct
  source 1..23: mol_type = other DNA
taacaccagggttgtttcccaga

SEQ ID NO: 1481 - DNA, 23 bp, synthetic construct
  source 1..23: mol_type = other DNA
tacaggcctgccgtcatcactga

SEQ ID NO: 1482 - DNA, 23 bp, synthetic construct
  source 1..23: mol_type = other DNA
tcaccctaaacagaggtagggga

SEQ ID NO: 1483 - DNA, 23 bp, synthetic construct
  source 1..23: mol_type = other DNA
tcatccaggttccaagcctaggg

SEQ ID NO: 1484 - DNA, 23 bp, synthetic construct
  source 1..23: mol_type = other DNA
tgaacaaggtaagaaatttgtgg

SEQ ID NO: 1485 - DNA, 23 bp, synthetic construct
  source 1..23: mol_type = other DNA
tgaacaaggtaagaagtctctgg

SEQ ID NO: 1486 - DNA, 23 bp, synthetic construct
  source 1..23: mol_type = other DNA
tgaacaaggtaaggagcctgtgg

SEQ ID NO: 1487 - DNA, 23 bp, synthetic construct
  source 1..23: mol_type = other DNA
tgagcaaagccatgtggtccagg

SEQ ID NO: 1488 - DNA, 23 bp, synthetic construct
  source 1..23: mol_type = other DNA
tgccgaaatccagatcctgtggc

SEQ ID NO: 1489 - DNA, 23 bp, synthetic construct
  source 1..23: mol_type = other DNA
tgtcaccctaaacagaggtaggg

SEQ ID NO: 1490 - DNA, 23 bp, synthetic construct
  source 1..23: mol_type = other DNA
tgtttagggtgacagtggagggc

SEQ ID NO: 1491 - DNA, 23 bp, synthetic construct
  source 1..23: mol_type = other DNA
ttaatttcagcactgactgagga

SEQ ID NO: 1492 - DNA, 23 bp, synthetic construct
  source 1..23: mol_type = other DNA
ttcctaccttcttcagaagaagc

SEQ ID NO: 1493 - DNA, 23 bp, synthetic construct
  source 1..23: mol_type = other DNA
ttcctaccttcttcagaagaagc

SEQ ID NO: 1494 - DNA, 23 bp, synthetic construct
  source 1..23: mol_type = other DNA
ttctacagactgtatgtttggga

SEQ ID NO: 1495 - DNA, 23 bp, synthetic construct
  source 1..23: mol_type = other DNA
ttcttacctgcttcagaatgagc

SEQ ID NO: 1496 - DNA, 23 bp, synthetic construct
  source 1..23: mol_type = other DNA
ttcttacctgcttcagaatgagc

SEQ ID NO: 1497 - DNA, 23 bp, synthetic construct
  source 1..23: mol_type = other DNA
ttcttaccttgttcaaaaaaagc

SEQ ID NO: 1498 - DNA, 23 bp, synthetic construct
  source 1..23: mol_type = other DNA
ttcttaccttgttcaaaaaaagc

SEQ ID NO: 1499 - DNA, 23 bp, synthetic construct
  source 1..23: mol_type = other DNA
ttgaacaaggtaagaagttgtgc

SEQ ID NO: 1500 - DNA, 23 bp, synthetic construct
  source 1..23: mol_type = other DNA
tttcagcaccaactgaaaacagc

SEQ ID NO: 1501 - DNA, 23 bp, synthetic construct
  source 1..23: mol_type = other DNA
tttcagcaccacctgagaaaagc

SEQ ID NO: 1502 - DNA, 23 bp, synthetic construct
  source 1..23: mol_type = other DNA
tttctacagactgtatgtttggg

SEQ ID NO: 1503 - DNA, 23 bp, synthetic construct
  source 1..23: mol_type = other DNA
ttttagcagcacctgagcaaagc

SEQ ID NO: 1504 - DNA, 23 bp, synthetic construct
  source 1..23: mol_type = other DNA
ttttctacagactgtatgtttgg

SEQ ID NO: 1505 - RNA, 20 nt, synthetic construct
  source 1..20: mol_type = other RNA
aaaacaccaagggcctgtat

SEQ ID NO: 1506 - RNA, 20 nt, synthetic construct
  source 1..20: mol_type = other RNA
aaacaccaagggcctgtatc

SEQ ID NO: 1507 - RNA, 20 nt, synthetic construct
  source 1..20: mol_type = other RNA
aaacgtacttcttcaagcag

SEQ ID NO: 1508 - RNA, 20 nt, synthetic construct
  source 1..20: mol_type = other RNA
aaacgtacttcttcaagcag

SEQ ID NO: 1509 - RNA, 20 nt, synthetic construct
  source 1..20: mol_type = other RNA
aacacaggtacctttgggac

SEQ ID NO: 1510 - RNA, 20 nt, synthetic construct
  source 1..20: mol_type = other RNA
aacaccaaggggctgccaca

SEQ ID NO: 1511 - RNA, 20 nt, synthetic construct
  source 1..20: mol_type = other RNA
aagccactggaaattccaaa

SEQ ID NO: 1512 - RNA, 20 nt, synthetic construct
  source 1..20: mol_type = other RNA
aaggcagtccattctgcatc

SEQ ID NO: 1513 - RNA, 20 nt, synthetic construct
  source 1..20: mol_type = other RNA
aatttcttaccttgttcaga

SEQ ID NO: 1514 - RNA, 20 nt, synthetic construct
  source 1..20: mol_type = other RNA
acacaggtacctttgggact

SEQ ID NO: 1515 - RNA, 20 nt, synthetic construct
  source 1..20: mol_type = other RNA
acagtccaggactgctacca

SEQ ID NO: 1516 - RNA, 20 nt, synthetic construct
  source 1..20: mol_type = other RNA
acgcgatgctcagacacaga

SEQ ID NO: 1517 - RNA, 20 nt, synthetic construct
  source 1..20: mol_type = other RNA
acgtacttcttcaagcagtg

SEQ ID NO: 1518 - RNA, 20 nt, synthetic construct
  source 1..20: mol_type = other RNA
acgtacttcttcaagcagtg

SEQ ID NO: 1519 - RNA, 20 nt, synthetic construct
  source 1..20: mol_type = other RNA
agcccagctccttgttattg

SEQ ID NO: 1520 - RNA, 20 nt, synthetic construct
  source 1..20: mol_type = other RNA
aggatgctgtggcacaaggt

SEQ ID NO: 1521 - RNA, 20 nt, synthetic construct
  source 1..20: mol_type = other RNA
aggcctgtaaggaaagtatt

SEQ ID NO: 1522 - RNA, 20 nt, synthetic construct
  source 1..20: mol_type = other RNA
agtactcccacctcacacac

SEQ ID NO: 1523 - RNA, 20 nt, synthetic construct
  source 1..20: mol_type = other RNA
agtgctgaaattaaaacaga

SEQ ID NO: 1524 - RNA, 20 nt, synthetic construct
  source 1..20: mol_type = other RNA
atgtcaatcttggtcatcca

SEQ ID NO: 1525 - RNA, 20 nt, synthetic construct
  source 1..20: mol_type = other RNA
attatggacagagttaccga

SEQ ID NO: 1526 - RNA, 20 nt, synthetic construct
  source 1..20: mol_type = other RNA
cacacaagcagatattgcct

SEQ ID NO: 1527 - RNA, 20 nt, synthetic construct
  source 1..20: mol_type = other RNA
caccagcatagtcggacccc

SEQ ID NO: 1528 - RNA, 20 nt, synthetic construct
  source 1..20: mol_type = other RNA
cagtactcccacctcacaca

SEQ ID NO: 1529 - RNA, 20 nt, synthetic construct
  source 1..20: mol_type = other RNA
catcaacataataggaccac

SEQ ID NO: 1530 - RNA, 20 nt, synthetic construct
  source 1..20: mol_type = other RNA
catccaggttccaagcctag

SEQ ID NO: 1531 - RNA, 20 nt, synthetic construct
  source 1..20: mol_type = other RNA
ccaaacctagaaagaaaaca

SEQ ID NO: 1532 - RNA, 20 nt, synthetic construct
  source 1..20: mol_type = other RNA
cctgcccatttatttgtccc

SEQ ID NO: 1533 - RNA, 20 nt, synthetic construct
  source 1..20: mol_type = other RNA
cgatgccaatgtggtgtcat

SEQ ID NO: 1534 - RNA, 20 nt, synthetic construct
  source 1..20: mol_type = other RNA
cggcagtgctaccatggtaa

SEQ ID NO: 1535 - RNA, 20 nt, synthetic construct
  source 1..20: mol_type = other RNA
ctcccacctcacacacggat

SEQ ID NO: 1536 - RNA, 20 nt, synthetic construct
  source 1..20: mol_type = other RNA
ctgacacaatgcctggtgac

SEQ ID NO: 1537 - RNA, 20 nt, synthetic construct
  source 1..20: mol_type = other RNA
ctgacacaatgctcagaaac

SEQ ID NO: 1538 - RNA, 20 nt, synthetic construct
  source 1..20: mol_type = other RNA
ctgacacgatgctcagatgc

SEQ ID NO: 1539 - RNA, 20 nt, synthetic construct
  source 1..20: mol_type = other RNA
ctgacgcaatgtccagtgat

SEQ ID NO: 1540 - RNA, 20 nt, synthetic construct
  source 1..20: mol_type = other RNA
ctgacgcgatgctcagacac

SEQ ID NO: 1541 - RNA, 20 nt, synthetic construct
  source 1..20: mol_type = other RNA
ctgcccatttatttgtccct

SEQ ID NO: 1542 - RNA, 20 nt, synthetic construct
  source 1..20: mol_type = other RNA
ctgccgaaatccagatcctg

SEQ ID NO: 1543 - RNA, 20 nt, synthetic construct
  source 1..20: mol_type = other RNA
ctgctaccgaggtgatggac

SEQ ID NO: 1544 - RNA, 20 nt, synthetic construct
  source 1..20: mol_type = other RNA
ctggggtccaggactgctac

SEQ ID NO: 1545 - RNA, 20 nt, synthetic construct
  source 1..20: mol_type = other RNA
ctgtcaatcttggtcatcta

SEQ ID NO: 1546 - RNA, 20 nt, synthetic construct
  source 1..20: mol_type = other RNA
ctgtcaccctaaacagaggt

SEQ ID NO: 1547 - RNA, 20 nt, synthetic construct
  source 1..20: mol_type = other RNA
ctgtttagggtgacagtgga

SEQ ID NO: 1548 - RNA, 20 nt, synthetic construct
  source 1..20: mol_type = other RNA
gaaatggacagagttatcaa

SEQ ID NO: 1549 - RNA, 20 nt, synthetic construct
  source 1..20: mol_type = other RNA
gaacaaggtaagaagtctct

SEQ ID NO: 1550 - RNA, 20 nt, synthetic construct
  source 1..20: mol_type = other RNA
gaagcccagctccttgttat

SEQ ID NO: 1551 - RNA, 20 nt, synthetic construct
  source 1..20: mol_type = other RNA
gacttcctaccttcttcaga

SEQ ID NO: 1552 - RNA, 20 nt, synthetic construct
  source 1..20: mol_type = other RNA
gacttcttaccttgttcaga

SEQ ID NO: 1553 - RNA, 20 nt, synthetic construct
  source 1..20: mol_type = other RNA
gagcaaagccatgtggtcca

SEQ ID NO: 1554 - RNA, 20 nt, synthetic construct
  source 1..20: mol_type = other RNA
gagcaaagccccacagtcca

SEQ ID NO: 1555 - RNA, 20 nt, synthetic construct
  source 1..20: mol_type = other RNA
gagcaaagccccggggtcca

SEQ ID NO: 1556 - RNA, 20 nt, synthetic construct
  source 1..20: mol_type = other RNA
gaggatgctgtggcacaagg

SEQ ID NO: 1557 - RNA, 20 nt, synthetic construct
  source 1..20: mol_type = other RNA
gccacagcatcctcttcatt

SEQ ID NO: 1558 - RNA, 20 nt, synthetic construct
  source 1..20: mol_type = other RNA
gctccttaccttgttcagaa

SEQ ID NO: 1559 - RNA, 20 nt, synthetic construct
  source 1..20: mol_type = other RNA
gctccttaccttgttcagaa

SEQ ID NO: 1560 - RNA, 20 nt, synthetic construct
  source 1..20: mol_type = other RNA
gctgctaaaattaaaacaga

SEQ ID NO: 1561 - RNA, 20 nt, synthetic construct
  source 1..20: mol_type = other RNA
gcttcttaccttcttcagaa

SEQ ID NO: 1562 - RNA, 20 nt, synthetic construct
  source 1..20: mol_type = other RNA
gcttcttaccttcttcagaa

SEQ ID NO: 1563 - RNA, 20 nt, synthetic construct
  source 1..20: mol_type = other RNA
ggagcaaagccccacagtcc

SEQ ID NO: 1564 - RNA, 20 nt, synthetic construct
  source 1..20: mol_type = other RNA
ggagcaaagccccggggtcc

SEQ ID NO: 1565 - RNA, 20 nt, synthetic construct
  source 1..20: mol_type = other RNA
ggatgctgtggcacaaggtg

SEQ ID NO: 1566 - RNA, 20 nt, synthetic construct
  source 1..20: mol_type = other RNA
ggcagtccattctgcatctg

SEQ ID NO: 1567 - RNA, 20 nt, synthetic construct
  source 1..20: mol_type = other RNA
ggctccttaccttgttcaga

SEQ ID NO: 1568 - RNA, 20 nt, synthetic construct
  source 1..20: mol_type = other RNA
ggcttcttaccttcttcaga

SEQ ID NO: 1569 - RNA, 20 nt, synthetic construct
  source 1..20: mol_type = other RNA
ggggtccaggactgctaccg

SEQ ID NO: 1570 - RNA, 20 nt, synthetic construct
  source 1..20: mol_type = other RNA
gggtgcaggagtgctaccac

SEQ ID NO: 1571 - RNA, 20 nt, synthetic construct
  source 1..20: mol_type = other RNA
ggtgctgaaatgaaaagaaa

SEQ ID NO: 1572 - RNA, 20 nt, synthetic construct
  source 1..20: mol_type = other RNA
ggtgctgctaaaattaaaac

SEQ ID NO: 1573 - RNA, 20 nt, synthetic construct
  source 1..20: mol_type = other RNA
gtcaccctaaacagaggtag

SEQ ID NO: 1574 - RNA, 20 nt, synthetic construct
  source 1..20: mol_type = other RNA
gtcagtgctgaaattaaaac

SEQ ID NO: 1575 - RNA, 20 nt, synthetic construct
  source 1..20: mol_type = other RNA
gtcatccaggttccaagcct

SEQ ID NO: 1576 - RNA, 20 nt, synthetic construct
  source 1..20: mol_type = other RNA
gtccaggactgctaccgagg

SEQ ID NO: 1577 - RNA, 20 nt, synthetic construct
  source 1..20: mol_type = other RNA
taacaccaaggactaatctc

SEQ ID NO: 1578 - RNA, 20 nt, synthetic construct
  source 1..20: mol_type = other RNA
taacaccaaggggctgccac

SEQ ID NO: 1579 - RNA, 20 nt, synthetic construct
  source 1..20: mol_type = other RNA
taacaccagggttgtttccc

SEQ ID NO: 1580 - RNA, 20 nt, synthetic construct
  source 1..20: mol_type = other RNA
tacaggcctgccgtcatcac

SEQ ID NO: 1581 - RNA, 20 nt, synthetic construct
  source 1..20: mol_type = other RNA
tcaccctaaacagaggtagg

SEQ ID NO: 1582 - RNA, 20 nt, synthetic construct
  source 1..20: mol_type = other RNA
tcatccaggttccaagccta

SEQ ID NO: 1583 - RNA, 20 nt, synthetic construct
  source 1..20: mol_type = other RNA
tgaacaaggtaagaaatttg

SEQ ID NO: 1584 - RNA, 20 nt, synthetic construct
  source 1..20: mol_type = other RNA
tgaacaaggtaagaagtctc

SEQ ID NO: 1585 - RNA, 20 nt, synthetic construct
  source 1..20: mol_type = other RNA
tgaacaaggtaaggagcctg

SEQ ID NO: 1586 - RNA, 20 nt, synthetic construct
  source 1..20: mol_type = other RNA
tgagcaaagccatgtggtcc

SEQ ID NO: 1587 - RNA, 20 nt, synthetic construct
  source 1..20: mol_type = other RNA
tgccgaaatccagatcctgt

SEQ ID NO: 1588 - RNA, 20 nt, synthetic construct
  source 1..20: mol_type = other RNA
tgtcaccctaaacagaggta

SEQ ID NO: 1589 - RNA, 20 nt, synthetic construct
  source 1..20: mol_type = other RNA
tgtttagggtgacagtggag

SEQ ID NO: 1590 - RNA, 20 nt, synthetic construct
  source 1..20: mol_type = other RNA
ttaatttcagcactgactga

SEQ ID NO: 1591 - RNA, 20 nt, synthetic construct
  source 1..20: mol_type = other RNA
ttcctaccttcttcagaaga

SEQ ID NO: 1592 - RNA, 20 nt, synthetic construct
  source 1..20: mol_type = other RNA
ttcctaccttcttcagaaga

SEQ ID NO: 1593 - RNA, 20 nt, synthetic construct
  source 1..20: mol_type = other RNA
ttctacagactgtatgtttg

SEQ ID NO: 1594 - RNA, 20 nt, synthetic construct
  source 1..20: mol_type = other RNA
ttcttacctgcttcagaatg

SEQ ID NO: 1595 - RNA, 20 nt, synthetic construct
  source 1..20: mol_type = other RNA
ttcttacctgcttcagaatg

SEQ ID NO: 1596 - RNA, 20 nt, synthetic construct
  source 1..20: mol_type = other RNA
ttcttaccttgttcaaaaaa

SEQ ID NO: 1597 - RNA, 20 nt, synthetic construct
  source 1..20: mol_type = other RNA
ttcttaccttgttcaaaaaa

SEQ ID NO: 1598 - RNA, 20 nt, synthetic construct
  source 1..20: mol_type = other RNA
ttgaacaaggtaagaagttg

SEQ ID NO: 1599 - RNA, 20 nt, synthetic construct
  source 1..20: mol_type = other RNA
tttcagcaccaactgaaaac

SEQ ID NO: 1600 - RNA, 20 nt, synthetic construct
  source 1..20: mol_type = other RNA
tttcagcaccacctgagaaa

SEQ ID NO: 1601 - RNA, 20 nt, synthetic construct
  source 1..20: mol_type = other RNA
tttctacagactgtatgttt

SEQ ID NO: 1602 - RNA, 20 nt, synthetic construct
  source 1..20: mol_type = other RNA
ttttagcagcacctgagcaa

SEQ ID NO: 1603 - RNA, 20 nt, synthetic construct
  source 1..20: mol_type = other RNA
ttttctacagactgtatgtt

SEQ ID NO: 1604 - RNA, 109 nt, synthetic construct
  source 1..109: mol_type = other RNA
tattttataagactctatattgttttagtactctgtaatgaaaattacagaatctactaaaacaaggcaaaatgccgtgtttatctcgtcaacttgttggcgagatttt

SEQ ID NO: 1605 - RNA, 109 nt, synthetic construct; identical to SEQ ID NO: 1604
  source 1..109: mol_type = other RNA

SEQ ID NO: 1606 - RNA, 100 nt, synthetic construct
  source 1..100: mol_type = other RNA
aggcaatgtggagcagctgagttttagagctagaaatagcaagttaaaataaggctagtccgttatcaacttgaaaaagtggcaccgagtcggtgctttt

SEQ ID NO: 1607 - RNA, 100 nt, synthetic construct; identical to SEQ ID NO: 1606
  source 1..100: mol_type = other RNA

SEQ ID NO: 1608 - RNA, 100 nt, synthetic construct
  source 1..100: mol_type = other RNA
atgattctctcagagacccagttttagagctagaaatagcaagttaaaataaggctagtccgttatcaacttgaaaaagtggcaccgagtcggtgctttt

SEQ ID NO: 1609 - RNA, 100 nt, synthetic construct; identical to SEQ ID NO: 1608
  source 1..100: mol_type = other RNA

SEQ ID NO: 1610 - RNA, 100 nt, synthetic construct
  source 1..100: mol_type = other RNA
gcaatgtggagcagctgagggttttagagctagaaatagcaagttaaaataaggctagtccgttatcaacttgaaaaagtggcaccgagtcggtgctttt

SEQ ID NO: 1611 - RNA, 100 nt, synthetic construct; identical to SEQ ID NO: 1610
  source 1..100: mol_type = other RNA

SEQ ID NO: 1612 - RNA, 100 nt, synthetic construct
  source 1..100: mol_type = other RNA
ggaggaaacaagactaatcagttttagagctagaaatagcaagttaaaataaggctagtccgttatcaacttgaaaaagtggcaccgagtcggtgctttt

SEQ ID NO: 1613 - RNA, 100 nt, synthetic construct; identical to SEQ ID NO: 1612
  source 1..100: mol_type = other RNA

SEQ ID NO: 1614 - RNA, 100 nt, synthetic construct
  source 1..100: mol_type = other RNA
atcaggaaagatgaaggtctgttttagagctagaaatagcaagttaaaataaggctagtccgttatcaacttgaaaaagtggcaccgagtcggtgctttt

SEQ ID NO: 1615 - RNA, 100 nt, synthetic construct; identical to SEQ ID NO: 1614
  source 1..100: mol_type = other RNA

SEQ ID NO: 1616 - RNA, 100 nt, synthetic construct
  source 1..100: mol_type = other RNA
aatttgactatctggtttgtgttttagagctagaaatagcaagttaaaataaggctagtccgttatcaacttgaaaaagtggcaccgagtcggtgctttt

SEQ ID NO: 1617 - RNA, 100 nt, synthetic construct; identical to SEQ ID NO: 1616
  source 1..100: mol_type = other RNA

SEQ ID NO: 1618 - RNA, 100 nt, synthetic construct
  source 1..100: mol_type = other RNA
tcaggaaagatgaaggtctagttttagagctagaaatagcaagttaaaataaggctagtccgttatcaacttgaaaaagtggcaccgagtcggtgctttt

SEQ ID NO: 1619 - RNA, 100 nt, synthetic construct; identical to SEQ ID NO: 1618
  source 1..100: mol_type = other RNA

SEQ ID NO: 1620 - RNA, 100 nt, synthetic construct
  source 1..100: mol_type = other RNA
aagccatttcccccctcagcgttttagagctagaaatagcaagttaaaataaggctagtccgttatcaacttgaaaaagtggcaccgagtcggtgctttt

SEQ ID NO: 1621 - RNA, 100 nt, synthetic construct; identical to SEQ ID NO: 1620
  source 1..100: mol_type = other RNA

SEQ ID NO: 1622 - RNA, 109 nt, synthetic construct
  source 1..109: mol_type = other RNA
gaaggagtaaggagacataaagttttagtactctgtaatgaaaattacagaatctactaaaacaaggcaaaatgccgtgtttatctcgtcaacttgttggcgagatttt

SEQ ID NO: 1623 - RNA, 109 nt, synthetic construct; identical to SEQ ID NO: 1622
  source 1..109: mol_type = other RNA

SEQ ID NO: 1624 - RNA, 100 nt, synthetic construct
  source 1..100: mol_type = other RNA
caggaaagatgaaggtctaggttttagagctagaaatagcaagttaaaataaggctagtccgttatcaacttgaaaaagtggcaccgagtcggtgctttt

SEQ ID NO: 1625 - RNA, 100 nt, synthetic construct; identical to SEQ ID NO: 1624
  source 1..100: mol_type = other RNA

SEQ ID NO: 1626 - RNA, 100 nt, synthetic construct
  source 1..100: mol_type = other RNA
taatttgactatctggtttggttttagagctagaaatagcaagttaaaataaggctagtccgttatcaacttgaaaaagtggcaccgagtcggtgctttt

SEQ ID NO: 1627 - RNA, 100 nt, synthetic construct; identical to SEQ ID NO: 1626
  source 1..100: mol_type = other RNA

SEQ ID NO: 1628 - RNA, 109 nt, synthetic construct
  source 1..109: mol_type = other RNA
ttttattttatccaaaagaaagttttagtactctgtaatgaaaattacagaatctactaaaacaaggcaaaatgccgtgtttatctcgtcaacttgttggcgagatttt

SEQ ID NO: 1629 - RNA, 109 nt, synthetic construct; identical to SEQ ID NO: 1628
  source 1..109: mol_type = other RNA

SEQ ID NO: 1630 - RNA, 100 nt, synthetic construct
  source 1..100: mol_type = other RNA
ttgactatctggtttgtggggttttagagctagaaatagcaagttaaaataaggctagtccgttatcaacttgaaaaagtggcaccgagtcggtgctttt

SEQ ID NO: 1631 - RNA, 100 nt, synthetic construct; identical to SEQ ID NO: 1630
  source 1..100: mol_type = other RNA

SEQ ID NO: 1632 - RNA, 100 nt, synthetic construct
  source 1..100: mol_type = other RNA
taagttaatgattctctcaggttttagagctagaaatagcaagttaaaataaggctagtccgttatcaacttgaaaaagtggcaccgagtcggtgctttt

SEQ ID NO: 1633 - RNA, 100 nt, synthetic construct; identical to SEQ ID NO: 1632
  source 1..100: mol_type = other RNA

SEQ ID NO: 1634 - RNA, 100 nt, synthetic construct
  source 1..100: mol_type = other RNA
gagagtgcaatgtcaatagagttttagagctagaaatagcaagttaaaataaggctagtccgttatcaacttgaaaaagtggcaccgagtcggtgctttt

SEQ ID NO: 1635 - RNA, 100 nt, synthetic construct; identical to SEQ ID NO: 1634
  source 1..100: mol_type = other RNA

SEQ ID NO: 1636 - RNA, 100 nt, synthetic construct
  source 1..100: mol_type = other RNA
tgtcaatagatgctgggaaggttttagagctagaaatagcaagttaaaataaggctagtccgttatcaacttgaaaaagtggcaccgagtcggtgctttt

SEQ ID NO: 1637 - RNA, 100 nt, synthetic construct; identical to SEQ ID NO: 1636
  source 1..100: mol_type = other RNA

SEQ ID NO: 1638 - RNA, 100 nt, synthetic construct
  source 1..100: mol_type = other RNA
accctgctgagccagtggcagttttagagctagaaatagcaagttaaaataaggctagtccgttatcaacttgaaaaagtggcaccgagtcggtgctttt

SEQ ID NO: 1639 - RNA, 100 nt, synthetic construct; identical to SEQ ID NO: 1638
  source 1..100: mol_type = other RNA

SEQ ID NO: 1640 - RNA, 100 nt, synthetic construct
  source 1..100: mol_type = other RNA
tcaaggtaatgtttgaacccgttttagagctagaaatagcaagttaaaataaggctagtccgttatcaacttgaaaaagtggcaccgagtcggtgctttt

SEQ ID NO: 1641 - RNA, 100 nt, synthetic construct; identical to SEQ ID NO: 1640
  source 1..100: mol_type = other RNA

SEQ ID NO: 1642 - RNA, 100 nt, synthetic construct
  source 1..100: mol_type = other RNA
gaaagatgaaggtctagggggttttagagctagaaatagcaagttaaaataaggctagtccgttatcaacttgaaaaagtggcaccgagtcggtgctttt

SEQ ID NO: 1643 - RNA, 100 nt, synthetic construct; identical to SEQ ID NO: 1642
  source 1..100: mol_type = other RNA

SEQ ID NO: 1644 - RNA, 100 nt, synthetic construct
  source 1..100: mol_type = other RNA
aagatgaaggtctaggggtggttttagagctagaaatagcaagttaaaataaggctagtccgttatcaacttgaaaaagtggcaccgagtcggtgctttt

SEQ ID NO: 1645 - RNA, 100 nt, synthetic construct; identical to SEQ ID NO: 1644
  source 1..100: mol_type = other RNA

SEQ ID NO: 1646 - RNA, 109 nt, synthetic construct
  source 1..109: mol_type = other RNA
taaaatatttgagagtgcaatgttttagtactctgtaatgaaaattacagaatctactaaaacaaggcaaaatgccgtgtttatctcgtcaacttgttggcgagatttt

SEQ ID NO: 1647 - RNA, 109 nt, synthetic construct; identical to SEQ ID NO: 1646
  source 1..109: mol_type = other RNA

SEQ ID NO: 1648 - RNA, 100 nt, synthetic construct
  source 1..100: mol_type = other RNA
gggaggaaacaagactaatcgttttagagctagaaatagcaagttaaaataaggctagtccgttatcaacttgaaaaagtggcaccgagtcggtgctttt

SEQ ID NO: 1649 - RNA, 100 nt, synthetic construct; identical to SEQ ID NO: 1648
  source 1..100: mol_type = other RNA

SEQ ID NO: 1650 - RNA, 100 nt, synthetic construct
  source 1..100: mol_type = other RNA
cccatgccactggctcagcagttttagagctagaaatagcaagttaaaataaggctagtccgttatcaacttgaaaaagtggcaccgagtcggtgctttt

SEQ ID NO: 1651 - RNA, 100 nt, synthetic construct; identical to SEQ ID NO: 1650
  source 1..100: mol_type = other RNA

SEQ ID NO: 1652 - RNA, 100 nt, synthetic construct
  source 1..100: mol_type = other RNA
tgcaatgtcaatagatgctggttttagagctagaaatagcaagttaaaataaggctagtccgttatcaacttgaaaaagtggcaccgagtcggtgctttt

SEQ ID NO: 1653 - RNA, 100 nt, synthetic construct; identical to SEQ ID NO: 1652
  source 1..100: mol_type = other RNA

SEQ ID NO: 1654 - RNA, 100 nt, synthetic construct
  source 1..100: mol_type = other RNA
taaaggcaatgtggagcagcgttttagagctagaaatagcaagttaaaataaggctagtccgttatcaacttgaaaaagtggcaccgagtcggtgctttt

SEQ ID NO: 1655 - RNA, 100 nt, synthetic construct; identical to SEQ ID NO: 1654
  source 1..100: mol_type = other RNA

SEQ ID NO: 1656 - RNA, 109 nt, synthetic construct
  source 1..109: mol_type = other RNA
gtcttataaaatatttgagaggttttagtactctgtaatgaaaattacagaatctactaaaacaaggcaaaatgccgtgtttatctcgtcaacttgttggcgagatttt

SEQ ID NO: 1657 - RNA, 109 nt, synthetic construct; identical to SEQ ID NO: 1656
  source 1..109: mol_type = other RNA

SEQ ID NO: 1658 - RNA, 100 nt, synthetic construct
  source 1..100: mol_type = other RNA
tttgaaccctgctgagccaggttttagagctagaaatagcaagttaaaataaggctagtccgttatcaacttgaaaaagtggcaccgagtcggtgctttt

SEQ ID NO: 1659 - RNA, 100 nt, synthetic construct; identical to SEQ ID NO: 1658
  source 1..100: mol_type = other RNA

SEQ ID NO: 1660 - RNA, 100 nt, synthetic construct
  source 1..100: mol_type = other RNA
gtaatgtttgaaccctgctggttttagagctagaaatagcaagttaaaataaggctagtccgttatcaacttgaaaaagtggcaccgagtcggtgctttt

SEQ ID NO: 1661 - RNA, 100 nt, synthetic construct; identical to SEQ ID NO: 1660
  source 1..100: mol_type = other RNA

SEQ ID NO: 1662 - RNA, 100 nt, synthetic construct
  source 1..100: mol_type = other RNA
ttgaaccctgctgagccagtgttttagagctagaaatagcaagttaaaataaggctagtccgttatcaacttgaaaaagtggcaccgagtcggtgctttt

SEQ ID NO: 1663 - RNA, 100 nt, synthetic construct; identical to SEQ ID NO: 1662
  source 1..100: mol_type = other RNA

SEQ ID NO: 1664 - RNA, 100 nt, synthetic construct
  source 1..100: mol_type = other RNA
gccagtggcatgggtctctggttttagagctagaaatagcaagttaaaataaggctagtccgttatcaacttgaaaaagtggcaccgagtcggtgctttt

SEQ ID NO: 1665 - RNA, 100 nt, synthetic construct; identical to SEQ ID NO: 1664
  source 1..100: mol_type = other RNA

SEQ ID NO: 1666 - RNA, 109 nt, synthetic construct
  source 1..109: mol_type = other RNA
tttataagactctatattcaagttttagtactctgtaatgaaaattacagaatctactaaaacaaggcaaaatgccgtgtttatctcgtcaacttgttggcgagatttt

SEQ ID NO: 1667 - RNA, 109 nt, synthetic construct; identical to SEQ ID NO: 1666
  source 1..109: mol_type = other RNA

SEQ ID NO: 1668 - RNA, 100 nt, synthetic construct
  source 1..100: mol_type = other RNA
gagccagtggcatgggtctcgttttagagctagaaatagcaagttaaaataaggctagtccgttatcaacttgaaaaagtggcaccgagtcggtgctttt

SEQ ID NO: 1669 - RNA, 100 nt, synthetic construct; identical to SEQ ID NO: 1668
  source 1..100: mol_type = other RNA

SEQ ID NO: 1670 - RNA, 109 nt, synthetic construct
  source 1..109: mol_type = other RNA
atcattaacttaatttgactagttttagtactctgtaatgaaaattacagaatctactaaaacaaggcaaaatgccgtgtttatctcgtcaacttgttggcgagatttt

SEQ ID NO: 1671 - RNA, 109 nt, synthetic construct; identical to SEQ ID NO: 1670
  source 1..109: mol_type = other RNA

SEQ ID NO: 1672 - RNA, 100 nt, synthetic construct
  source 1..100: mol_type = other RNA
ccctagaccttcatctttccgttttagagctagaaatagcaagttaaaataaggctagtccgttatcaacttgaaaaagtggcaccgagtcggtgctttt

SEQ ID NO: 1673 - RNA, 100 nt, synthetic construct; identical to SEQ ID NO: 1672
  source 1..100: mol_type = other RNA

SEQ ID NO: 1674 - RNA, 109 nt, synthetic construct
  source 1..109: mol_type = other RNA
caaaccagatagtcaaattaagttttagtactctgtaatgaaaattacagaatctactaaaacaaggcaaaatgccgtgtttatctcgtcaacttgttggcgagatttt

SEQ ID NO: 1675 - RNA, 109 nt, synthetic construct; identical to SEQ ID NO: 1674
  source 1..109: mol_type = other RNA

SEQ ID NO: 1676 - RNA, 100 nt, synthetic construct
  source 1..100: mol_type = other RNA
tttgagagtgcaatgtcaatgttttagagctagaaatagcaagttaaaataaggctagtccgttatcaacttgaaaaagtggcaccgagtcggtgctttt

SEQ ID NO: 1677 - RNA, 100 nt, synthetic construct; identical to SEQ ID NO: 1676
  source 1..100: mol_type = other RNA

SEQ ID NO: 1678 - RNA, 100 nt, synthetic construct
  source 1..100: mol_type = other RNA
aggtaatgtttgaaccctgcgttttagagctagaaatagcaagttaaaataaggctagtccgttatcaacttgaaaaagtggcaccgagtcggtgctttt

SEQ ID NO: 1679 - RNA, 100 nt, synthetic construct; identical to SEQ ID NO: 1678
  source 1..100: mol_type = other RNA

SEQ ID NO: 1680 - RNA, 100 nt, synthetic construct
  source 1..100: mol_type = other RNA
agtgcaatgtcaatagatgcgttttagagctagaaatagcaagttaaaataaggctagtccgttatcaacttgaaaaagtggcaccgagtcggtgctttt

SEQ ID NO: 1681 - RNA, 100 nt, synthetic construct; identical to SEQ ID NO: 1680
  source 1..100: mol_type = other RNA

SEQ ID NO: 1682 - RNA, 100 nt, synthetic construct
  source 1..100: mol_type = other RNA
gcagggttcaaacattacctgttttagagctagaaatagcaagttaaaataaggctagtccgttatcaacttgaaaaagtggcaccgagtcggtgctttt

SEQ ID NO: 1683 - RNA, 100 nt, synthetic construct; identical to SEQ ID NO: 1682
  source 1..100: mol_type = other RNA

SEQ ID NO: 1684 - RNA, 109 nt, synthetic construct
  source 1..109: mol_type = other RNA
accagatagtcaaattaagttgttttagtactctgtaatgaaaattacagaatctactaaaacaaggcaaaatgccgtgtttatctcgtcaacttgttggcgagatttt

SEQ ID NO: 1685 - RNA, 109 nt, synthetic construct; identical to SEQ ID NO: 1684
  source 1..109: mol_type = other RNA

SEQ ID NO: 1686 - RNA, 109 nt, synthetic construct
  source 1..109: mol_type = other RNA
gaggaaacaagactaatcagggttttagtactctgtaatgaaaattacagaatctactaaaacaaggcaaaatgccgtgtttatctcgtcaacttgttggcgagatttt

SEQ ID NO: 1687 - RNA, 109 nt, synthetic construct; identical to SEQ ID NO: 1686
  source 1..109: mol_type = other RNA

SEQ ID NO: 1688 - RNA, 109 nt, synthetic construct
  source 1..109: mol_type = other RNA
ggtctctgagagaatcattaagttttagtactctgtaatgaaaattacagaatctactaaaacaaggcaaaatgccgtgtttatctcgtcaacttgttggcgagatttt

SEQ ID NO: 1689 - RNA, 109 nt, synthetic construct; identical to SEQ ID NO: 1688
  source 1..109: mol_type = other RNA

SEQ ID NO: 1690 - RNA, 109 nt, synthetic construct
  source 1..109: mol_type = other RNA
cccacaaaccagatagtcaaagttttagtactctgtaatgaaaattacagaatctactaaaacaaggcaaaatgccgtgtttatctcgtcaacttgttggcgagatttt

SEQ ID NO: 1691 - RNA, 109 nt, synthetic construct; identical to SEQ ID NO: 1690
  source 1..109: mol_type = other RNA

SEQ ID NO: 1692 - RNA, 109 nt, synthetic construct
  source 1..109: mol_type = other RNA
atagagtcttataaaatatttgttttagtactctgtaatgaaaattacagaatctactaaaacaaggcaaaatgccgtgtttatctcgtcaacttgttggcgagatttt

SEQ ID NO: 1693 - RNA, 109 nt, synthetic construct; identical to SEQ ID NO: 1692
  source 1..109: mol_type = other RNA

SEQ ID NO: 1694 - RNA, 109 nt, synthetic construct
  source 1..109: mol_type = other RNA
atatttgagagtgcaatgtcagttttagtactctgtaatgaaaattacagaatctactaaaacaaggcaaaatgccgtgtttatctcgtcaacttgttggcgagatttt

SEQ ID NO: 1695 - RNA, 109 nt, synthetic construct; identical to SEQ ID NO: 1694
  source 1..109: mol_type = other RNA

SEQ ID NO: 1696 - RNA, 109 nt, synthetic construct
  source 1..109: mol_type = other RNA
caatgtcaatagatgctgggagttttagtactctgtaatgaaaattacagaatctactaaaacaaggcaaaatgccgtgtttatctcgtcaacttgttggcgagatttt

SEQ ID NO: 1697 - RNA, 109 nt, synthetic construct; identical to SEQ ID NO: 1696
  source 1..109: mol_type = other RNA

SEQ ID NO: 1698 - RNA, 109 nt, synthetic construct
  source 1..109: mol_type = other RNA
cacccctagaccttcatctttgttttagtactctgtaatgaaaattacagaatctactaaaacaaggcaaaatgccgtgtttatctcgtcaacttgttggcgagatttt

SEQ ID NO: 1699 - RNA, 109 nt, synthetic construct; identical to SEQ ID NO: 1698
  source 1..109: mol_type = other RNA

SEQ ID NO: 1700 - RNA, 109 nt, synthetic construct
  source 1..109: mol_type = other RNA
cctagaccttcatctttcctggttttagtactctgtaatgaaaattacagaatctactaaaacaaggcaaaatgccgtgtttatctcgtcaacttgttggcgagatttt

SEQ ID NO: 1701 - RNA, 109 nt, synthetic construct; identical to SEQ ID NO: 1700
  source 1..109: mol_type = other RNA

SEQ ID NO: 1702 - RNA, 109 nt, synthetic construct
  source 1..109: mol_type = other RNA
taccttgaatatagagtcttagttttagtactctgtaatgaaaattacagaatctactaaaacaaggcaaaatgccgtgtttatctcgtcaacttgttggcgagatttt

SEQ ID NO: 1703 - RNA, 109 nt, synthetic construct; identical to SEQ ID NO: 1702
  source 1..109: mol_type = other RNA

SEQ ID NO: 1704 - RNA, 109 nt, synthetic construct
  source 1..109: mol_type = other RNA
gaaccctgctgagccagtggcgttttagtactctgtaatgaaaattacagaatctactaaaacaaggcaaaatgccgtgtttatctcgtcaacttgttggcgagatttt

SEQ ID NO: 1705 - RNA, 109 nt, synthetic construct; identical to SEQ ID NO: 1704
  source 1..109: mol_type = other RNA

SEQ ID NO: 1706 - RNA, 109 nt, synthetic construct
  source 1..109: mol_type = other RNA
gtgcaatgtcaatagatgctggttttagtactctgtaatgaaaattacagaatctactaaaacaaggcaaaatgccgtgtttatctcgtcaacttgttggcgagatttt

SEQ ID NO: 1707 - RNA, 109 nt, synthetic construct; identical to SEQ ID NO: 1706
  source 1..109: mol_type = other RNA

SEQ ID NO: 1708 - RNA, 109 nt, synthetic construct
  source 1..109: mol_type = other RNA
aatcaggaaagatgaaggtctgttttagtactctgtaatgaaaattacagaatctactaaaacaaggcaaaatgccgtgtttatctcgtcaacttgttggcgagatttt

SEQ ID NO: 1709 - RNA, 109 nt, synthetic construct; identical to SEQ ID NO: 1708
  source 1..109: mol_type = other RNA

SEQ ID NO: 1710 - RNA, 109 nt, synthetic construct
  source 1..109: mol_type = other RNA
cttaatttgactatctggtttgttttagtactctgtaatgaaaattacagaatctactaaaacaaggcaaaatgccgtgtttatctcgtcaacttgttggcgagatttt

SEQ ID NO: 1711 - RNA, 109 nt, synthetic construct; identical to SEQ ID NO: 1710
  source 1..109: mol_type = other RNA

SEQ ID NO: 1712 - RNA, 109 nt, synthetic construct
  source 1..109: mol_type = other RNA
gttcaaacattaccttgaatagttttagtactctgtaatgaaaattacagaatctactaaaacaaggcaaaatgccgtgtttatctcgtcaacttgttggcgagatttt

SEQ ID NO: 1713 - RNA, 109 nt, synthetic construct; identical to SEQ ID NO: 1712
  source 1..109: mol_type = other RNA

SEQ ID NO: 1714 - RNA, 109 nt, synthetic construct
  source 1..109: mol_type = other RNA
gccagtggcatgggtctctgagttttagtactctgtaatgaaaattacagaatctactaaaacaaggcaaaatgccgtgtttatctcgtcaacttgttggcgagatttt

SEQ ID NO: 1715 - RNA, 109 nt, synthetic construct; identical to SEQ ID NO: 1714
  source 1..109: mol_type = other RNA

SEQ ID NO: 1716 - RNA, 109 nt, synthetic construct
  source 1..109: mol_type = other RNA
agacccatgccactggctcaggttttagtactctgtaatgaaaattacagaatctactaaaacaaggcaaaatgccgtgtttatctcgtcaacttgttggcgagatttt

SEQ ID NO: 1717 - RNA, 109 nt, synthetic construct; identical to SEQ ID NO: 1716
  source 1..109: mol_type = other RNA

SEQ ID NO: 1718 - RNA, 109 nt, synthetic construct
  source 1..109: mol_type = other RNA
cagcagggttcaaacattaccgttttagtactctgtaatgaaaattacagaatctactaaaacaaggcaaaatgccgtgtttatctcgtcaacttgttggcgagatttt

SEQ ID NO: 1719 - RNA, 109 nt, synthetic construct; identical to SEQ ID NO: 1718
  source 1..109: mol_type = other RNA

SEQ ID NO: 1720 - RNA, 109 nt, synthetic construct
  source 1..109: mol_type = other RNA
gcatctattgacattgcactcgttttagtactctgtaatgaaaattacagaatctactaaaacaaggcaaaatgccgtgtttatctcgtcaacttgttggcgagatttt

SEQ ID NO: 1721 - RNA, 109 nt, synthetic construct; identical to SEQ ID NO: 1720
  source 1..109: mol_type = other RNA

SEQ ID NO: 1722 - RNA, 109 nt, synthetic construct; identical to SEQ ID NO: 1604
  source 1..109: mol_type = other RNA

SEQ ID NO: 1723 - RNA, 100 nt, synthetic construct; identical to SEQ ID NO: 1606
  source 1..100: mol_type = other RNA

SEQ ID NO: 1724 - RNA, 100 nt, synthetic construct; identical to SEQ ID NO: 1608
  source 1..100: mol_type = other RNA

SEQ ID NO: 1725 - RNA, 100 nt, synthetic construct; identical to SEQ ID NO: 1610
  source 1..100: mol_type = other RNA

SEQ ID NO: 1726 - RNA, 100 nt, synthetic construct; identical to SEQ ID NO: 1612
  source 1..100: mol_type = other RNA

SEQ ID NO: 1727 - RNA, 100 nt, synthetic construct; identical to SEQ ID NO: 1614
  source 1..100: mol_type = other RNA

SEQ ID NO: 1728 - RNA, 100 nt, synthetic construct; identical to SEQ ID NO: 1616
  source 1..100: mol_type = other RNA

SEQ ID NO: 1729 - RNA, 100 nt, synthetic construct; identical to SEQ ID NO: 1618
  source 1..100: mol_type = other RNA

SEQ ID NO: 1730 - RNA, 100 nt, synthetic construct; identical to SEQ ID NO: 1620
  source 1..100: mol_type = other RNA

SEQ ID NO: 1731 - RNA, 109 nt, synthetic construct; identical to SEQ ID NO: 1622
  source 1..109: mol_type = other RNA

SEQ ID NO: 1732 - RNA, 100 nt, synthetic construct; identical to SEQ ID NO: 1624
  source 1..100: mol_type = other RNA

SEQ ID NO: 1733 - RNA, 100 nt, synthetic construct; identical to SEQ ID NO: 1626
  source 1..100: mol_type = other RNA

SEQ ID NO: 1734 - RNA, 109 nt, synthetic construct; identical to SEQ ID NO: 1628
  source 1..109: mol_type = other RNA

SEQ ID NO: 1735 - RNA, 100 nt, synthetic construct; identical to SEQ ID NO: 1630
  source 1..100: mol_type = other RNA

SEQ ID NO: 1736 - RNA, 100 nt, synthetic construct; identical to SEQ ID NO: 1632
  source 1..100: mol_type = other RNA

SEQ ID NO: 1737 - RNA, 100 nt, synthetic construct; identical to SEQ ID NO: 1634
  source 1..100: mol_type = other RNA

SEQ ID NO: 1738 - RNA, 100 nt, synthetic construct; identical to SEQ ID NO: 1636
  source 1..100: mol_type = other RNA

SEQ ID NO: 1739 - RNA, 100 nt, synthetic construct; identical to SEQ ID NO: 1638
  source 1..100: mol_type = other RNA

SEQ ID NO: 1740 - RNA, 100 nt, synthetic construct; identical to SEQ ID NO: 1640
  source 1..100: mol_type = other RNA

SEQ ID NO: 1741 - RNA, 100 nt, synthetic construct; identical to SEQ ID NO: 1642
  source 1..100: mol_type = other RNA

SEQ ID NO: 1742 - RNA, 100 nt, synthetic construct; identical to SEQ ID NO: 1644
  source 1..100: mol_type = other RNA

SEQ ID NO: 1743 - RNA, 109 nt, synthetic construct; identical to SEQ ID NO: 1646
  source 1..109: mol_type = other RNA

SEQ ID NO: 1744 - RNA, 100 nt, synthetic construct; identical to SEQ ID NO: 1648
  source 1..100: mol_type = other RNA

SEQ ID NO: 1745 - RNA, 100 nt, synthetic construct; identical to SEQ ID NO: 1650
  source 1..100: mol_type = other RNA

SEQ ID NO: 1746 - RNA, 100 nt, synthetic construct; identical to SEQ ID NO: 1652
  source 1..100: mol_type = other RNA

SEQ ID NO: 1747 - RNA, 100 nt, synthetic construct; identical to SEQ ID NO: 1654
  source 1..100: mol_type = other RNA

SEQ ID NO: 1748 - RNA, 109 nt, synthetic construct; identical to SEQ ID NO: 1656
  source 1..109: mol_type = other RNA

SEQ ID NO: 1749 - RNA, 100 nt, synthetic construct; identical to SEQ ID NO: 1658
  source 1..100: mol_type = other RNA

SEQ ID NO: 1750 - RNA, 100 nt, synthetic construct; identical to SEQ ID NO: 1660
  source 1..100: mol_type = other RNA

SEQ ID NO: 1751 - RNA, 100 nt, synthetic construct; identical to SEQ ID NO: 1662
  source 1..100: mol_type = other RNA

SEQ ID NO: 1752 - RNA, 100 nt, synthetic construct; identical to SEQ ID NO: 1664
  source 1..100: mol_type = other RNA

SEQ ID NO: 1753 - RNA, 109 nt, synthetic construct; identical to SEQ ID NO: 1666
  source 1..109: mol_type = other RNA

SEQ ID NO: 1754 - RNA, 100 nt, synthetic construct; identical to SEQ ID NO: 1668
  source 1..100: mol_type = other RNA

SEQ ID NO: 1755 - RNA, 109 nt, synthetic construct; identical to SEQ ID NO: 1670
  source 1..109: mol_type = other RNA

SEQ ID NO: 1756 - RNA, 100 nt, synthetic construct; identical to SEQ ID NO: 1672
  source 1..100: mol_type = other RNA

SEQ ID NO: 1757 - RNA, 109 nt, synthetic construct; identical to SEQ ID NO: 1674
  source 1..109: mol_type = other RNA

SEQ ID NO: 1758 - RNA, 100 nt, synthetic construct; identical to SEQ ID NO: 1676
  source 1..100: mol_type = other RNA

SEQ ID NO: 1759 - RNA, 100 nt, synthetic construct; identical to SEQ ID NO: 1678
  source 1..100: mol_type = other RNA

SEQ ID NO: 1760 - RNA, 100 nt, synthetic construct; identical to SEQ ID NO: 1680
  source 1..100: mol_type = other RNA

SEQ ID NO: 1761 - RNA, 100 nt, synthetic construct; identical to SEQ ID NO: 1682
  source 1..100: mol_type = other RNA

SEQ ID NO: 1762 - RNA, 109 nt, synthetic construct; identical to SEQ ID NO: 1684
  source 1..109: mol_type = other RNA

SEQ ID NO: 1763 - RNA, 109 nt, synthetic construct; identical to SEQ ID NO: 1686
  source 1..109: mol_type = other RNA

SEQ ID NO: 1764 - RNA, 109 nt, synthetic construct; identical to SEQ ID NO: 1688
  source 1..109: mol_type = other RNA

SEQ ID NO: 1765 - RNA, 109 nt, synthetic construct; identical to SEQ ID NO: 1690
  source 1..109: mol_type = other RNA

SEQ ID NO: 1766 - RNA, 109 nt, synthetic construct; identical to SEQ ID NO: 1692
  source 1..109: mol_type = other RNA

SEQ ID NO: 1767 - RNA, 109 nt, synthetic construct; identical to SEQ ID NO: 1694
  source 1..109: mol_type = other RNA

SEQ ID NO: 1768 - RNA, 109 nt, synthetic construct; identical to SEQ ID NO: 1696
  source 1..109: mol_type = other RNA

SEQ ID NO: 1769 - RNA, 109 nt, synthetic construct; identical to SEQ ID NO: 1698
  source 1..109: mol_type = other RNA

SEQ ID NO: 1770 - RNA, 109 nt, synthetic construct; identical to SEQ ID NO: 1700
  source 1..109: mol_type = other RNA

SEQ ID NO: 1771 - RNA, 109 nt, synthetic construct; identical to SEQ ID NO: 1702
  source 1..109: mol_type = other RNA

SEQ ID NO: 1772 - RNA, 109 nt, synthetic construct; identical to SEQ ID NO: 1704
  source 1..109: mol_type = other RNA

SEQ ID NO: 1773 - RNA, 109 nt, synthetic construct; identical to SEQ ID NO: 1706
  source 1..109: mol_type = other RNA

SEQ ID NO: 1774 - RNA, 109 nt, synthetic construct; identical to SEQ ID NO: 1708
  source 1..109: mol_type = other RNA

SEQ ID NO: 1775 - RNA, 109 nt, synthetic construct; identical to SEQ ID NO: 1710
  source 1..109: mol_type = other RNA

SEQ ID NO: 1776 - RNA, 109 nt, synthetic construct; identical to SEQ ID NO: 1712
  source 1..109: mol_type = other RNA

SEQ ID NO: 1777 - RNA, 109 nt, synthetic construct; identical to SEQ ID NO: 1714
  source 1..109: mol_type = other RNA

SEQ ID NO: 1778 - RNA, 109 nt, synthetic construct; identical to SEQ ID NO: 1716
  source 1..109: mol_type = other RNA

SEQ ID NO: 1779 - RNA, 109 nt, synthetic construct; identical to SEQ ID NO: 1718
  source 1..109: mol_type = other RNA

SEQ ID NO: 1780 - RNA, 109 nt, synthetic construct; identical to SEQ ID NO: 1720
  source 1..109: mol_type = other RNA

SEQ ID NO: 1781 - RNA, 100 nt, synthetic construct; identical to SEQ ID NO: 1405
  source 1..100: mol_type = other RNA

SEQ ID NO: 1782 - DNA, 27 bp, synthetic construct
  source 1..27: mol_type = other DNA
tattttataagactctatattcaaggt

SEQ ID NO: 1783 - DNA, 27 bp, synthetic construct
  source 1..27: mol_type = other DNA
tattttataagactctatattcaaggt

SEQ ID NO: 1784 - DNA, 23 bp, synthetic construct
  source 1..23: mol_type = other DNA
aggcaatgtggagcagctgaggg

SEQ ID NO: 1785 - DNA, 23 bp, synthetic construct
  source 1..23: mol_type = other DNA
aggcaatgtggagcagctgaggg

SEQ ID NO: 1786 - DNA, 23 bp, synthetic construct
  source 1..23: mol_type = other DNA
atgattctctcagagacccatgc

SEQ ID NO: 1787 - DNA, 23 bp, synthetic construct
  source 1..23: mol_type = other DNA
atgattctctcagagacccatgc

SEQ ID NO: 1788 - DNA, 23 bp, synthetic construct
  source 1..23: mol_type = other DNA
gcaatgtggagcagctgaggggg

SEQ ID NO: 1789 - DNA, 23 bp, synthetic construct
  source 1..23: mol_type = other DNA
gcaatgtggagcagctgaggggg

SEQ ID NO: 1790 - DNA, 23 bp, synthetic construct
  source 1..23: mol_type = other DNA
ggaggaaacaagactaatcagga

SEQ ID NO: 1791 - DNA, 23 bp, synthetic construct
  source 1..23: mol_type = other DNA
ggaggaaacaagactaatcagga

SEQ ID NO: 1792 - DNA, 23 bp, synthetic construct
  source 1..23: mol_type = other DNA
atcaggaaagatgaaggtctagg

SEQ ID NO: 1793 - DNA, 23 bp, synthetic construct
  source 1..23: mol_type = other DNA
atcaggaaagatgaaggtctagg

SEQ ID NO: 1794 - DNA, 23 bp, synthetic construct
  source 1..23: mol_type = other DNA
aatttgactatctggtttgtggg

SEQ ID NO: 1795 - DNA, 23 bp, synthetic construct
  source 1..23: mol_type = other DNA
aatttgactatctggtttgtggg

SEQ ID NO: 1796 - DNA, 23 bp, synthetic construct
  source 1..23: mol_type = other DNA
tcaggaaagatgaaggtctaggg

SEQ ID NO: 1797 - DNA, 23 bp, synthetic construct
  source 1..23: mol_type = other DNA
tcaggaaagatgaaggtctaggg

SEQ ID NO: 1798 - DNA, 23 bp, synthetic construct
  source 1..23: mol_type = other DNA
aagccatttcccccctcagctgc

SEQ ID NO: 1799 - DNA, 23 bp, synthetic construct
  source 1..23: mol_type = other DNA
aagccatttcccccctcagctgc

SEQ ID NO: 1800 - DNA, 27 bp, synthetic construct
  source 1..27: mol_type = other DNA
gaaggagtaaggagacataaaggcaat

SEQ ID NO: 1801 - DNA, 27 bp, synthetic construct
  source 1..27: mol_type = other DNA
gaaggagtaaggagacataaaggcaat

SEQ ID NO: 1802 - DNA, 23 bp, synthetic construct
  source 1..23: mol_type = other DNA
caggaaagatgaaggtctagggg

SEQ ID NO: 1803 - DNA, 23 bp, synthetic construct
  source 1..23: mol_type = other DNA
caggaaagatgaaggtctagggg

SEQ ID NO: 1804 - DNA, 23 bp, synthetic construct
  source 1..23: mol_type = other DNA
taatttgactatctggtttgtgg

SEQ ID NO: 1805 - DNA, 23 bp, synthetic construct
  source 1..23: mol_type = other DNA
taatttgactatctggtttgtgg

SEQ ID NO: 1806 - DNA, 27 bp, synthetic construct
  source 1..27: mol_type = other DNA
ttttattttatccaaaagaaagagaat

SEQ ID NO: 1807 - DNA, 27 bp, synthetic construct
  source 1..27: mol_type = other DNA
ttttattttatccaaaagaaagagaat

SEQ ID NO: 1808 - DNA, 23 bp, synthetic construct
  source 1..23: mol_type = other DNA
ttgactatctggtttgtgggtgc

SEQ ID NO: 1809 - DNA, 23 bp, synthetic construct
  source 1..23: mol_type = other DNA
ttgactatctggtttgtgggtgc

SEQ ID NO: 1810 - DNA, 23 bp, synthetic construct
  source 1..23: mol_type = other DNA
taagttaatgattctctcagaga

SEQ ID NO: 1811 - DNA, 23 bp, synthetic construct
  source 1..23: mol_type = other DNA
taagttaatgattctctcagaga

SEQ ID NO: 1812 - DNA, 23 bp, synthetic construct
  source 1..23: mol_type = other DNA
gagagtgcaatgtcaatagatgc

SEQ ID NO: 1813 - DNA, 23 bp, synthetic construct
  source 1..23: mol_type = other DNA
gagagtgcaatgtcaatagatgc

SEQ ID NO: 1814 - DNA, 23 bp, synthetic construct
  source 1..23: mol_type = other DNA
tgtcaatagatgctgggaagtgg

SEQ ID NO: 1815 - DNA, 23 bp, synthetic construct
  source 1..23: mol_type = other DNA
tgtcaatagatgctgggaagtgg

SEQ ID NO: 1816 - DNA, 23 bp, synthetic construct
  source 1..23: mol_type = other DNA
accctgctgagccagtggcatgg

SEQ ID NO: 1817 - DNA, 23 bp, synthetic construct
  source 1..23: mol_type = other DNA
accctgctgagccagtggcatgg

SEQ ID NO: 1818 - DNA, 23 bp, synthetic construct
  source 1..23: mol_type = other DNA
tcaaggtaatgtttgaaccctgc

SEQ ID NO: 1819 - DNA, 23 bp, synthetic construct
  source 1..23: mol_type = other DNA
tcaaggtaatgtttgaaccctgc

SEQ ID NO: 1820 - DNA, 23 bp, synthetic construct
  source 1..23: mol_type = other DNA
gaaagatgaaggtctaggggtga

SEQ ID NO: 1821 - DNA, 23 bp, synthetic construct
  source 1..23: mol_type = other DNA
gaaagatgaaggtctaggggtga

SEQ ID NO: 1822 - DNA, 23 bp, synthetic construct
  source 1..23: mol_type = other DNA
aagatgaaggtctaggggtgagg

SEQ ID NO: 1823 - DNA, 23 bp, synthetic construct
  source 1..23: mol_type = other DNA
aagatgaaggtctaggggtgagg

SEQ ID NO: 1824 - DNA, 27 bp, synthetic construct
  source 1..27: mol_type = other DNA
taaaatatttgagagtgcaatgtcaat

SEQ ID NO: 1825 - DNA, 27 bp, synthetic construct
  source 1..27: mol_type = other DNA
taaaatatttgagagtgcaatgtcaat

SEQ ID NO: 1826 - DNA, 23 bp, synthetic construct
  source 1..23: mol_type = other DNA
gggaggaaacaagactaatcagg

SEQ ID NO: 1827 - DNA, 23 bp, synthetic construct
  source 1..23: mol_type = other DNA
gggaggaaacaagactaatcagg

SEQ ID NO: 1828 - DNA, 23 bp, synthetic construct
  source 1..23: mol_type = other DNA
cccatgccactggctcagcaggg

SEQ ID NO: 1829 - DNA, 23 bp, synthetic construct
  source 1..23: mol_type = other DNA
cccatgccactggctcagcaggg

SEQ ID NO: 1830 - DNA, 23 bp, synthetic construct
  source 1..23: mol_type = other DNA
tgcaatgtcaatagatgctggga

SEQ ID NO: 1831 - DNA, 23 bp, synthetic construct
  source 1..23: mol_type = other DNA
tgcaatgtcaatagatgctggga

SEQ ID NO: 1832 - DNA, 23 bp, synthetic construct
  source 1..23: mol_type = other DNA
taaaggcaatgtggagcagctga

SEQ ID NO: 1833 - DNA, 23 bp, synthetic construct
  source 1..23: mol_type = other DNA
taaaggcaatgtggagcagctga

SEQ ID NO: 1834 - DNA, 27 bp, synthetic construct
  source 1..27: mol_type = other DNA
gtcttataaaatatttgagagtgcaat

SEQ ID NO: 1835 - DNA, 27 bp, synthetic construct
  source 1..27: mol_type = other DNA
gtcttataaaatatttgagagtgcaat

SEQ ID NO: 1836 - DNA, 23 bp, synthetic construct
  source 1..23: mol_type = other DNA
tttgaaccctgctgagccagtgg

SEQ ID NO: 1837 - DNA, 23 bp, synthetic construct
  source 1..23: mol_type = other DNA
tttgaaccctgctgagccagtgg

SEQ ID NO: 1838 - DNA, 23 bp, synthetic construct
  source 1..23: mol_type = other DNA
gtaatgtttgaaccctgctgagc

SEQ ID NO: 1839 - DNA, 23 bp, synthetic construct
  source 1..23: mol_type = other DNA
gtaatgtttgaaccctgctgagc

SEQ ID NO: 1840 - DNA, 23 bp, synthetic construct
  source 1..23: mol_type = other DNA
ttgaaccctgctgagccagtggc

SEQ ID NO: 1841 - DNA, 23 bp, synthetic construct
  source 1..23: mol_type = other DNA
ttgaaccctgctgagccagtggc

SEQ ID NO: 1842 - DNA, 23 bp, synthetic construct
  source 1..23: mol_type = other DNA
gccagtggcatgggtctctgaga

SEQ ID NO: 1843 - DNA, 23 bp, synthetic construct
  source 1..23: mol_type = other DNA
gccagtggcatgggtctctgaga

SEQ ID NO: 1844 - DNA, 27 bp, synthetic construct
  source 1..27: mol_type = other DNA
tttataagactctatattcaaggtaat

SEQ ID NO: 1845 - DNA, 27 bp, synthetic construct
  source 1..27: mol_type = other DNA
tttataagactctatattcaaggtaat

SEQ ID NO: 1846 - DNA, 23 bp, synthetic construct
  source 1..23: mol_type = other DNA
gagccagtggcatgggtctctga

SEQ ID NO: 1847 - DNA, 23 bp, synthetic construct
  source 1..23: mol_type = other DNA
gagccagtggcatgggtctctga

SEQ ID NO: 1848 - DNA, 27 bp, synthetic construct
  source 1..27: mol_type = other DNA
atcattaacttaatttgactatctggt

SEQ ID NO: 1849 - DNA, 27 bp, synthetic construct
  source 1..27: mol_type = other DNA
atcattaacttaatttgactatctggt

SEQ ID NO: 1850 - DNA, 23 bp, synthetic construct
  source 1..23: mol_type = other DNA
ccctagaccttcatctttcctga

SEQ ID NO: 1851 - DNA, 23 bp, synthetic construct
  source 1..23: mol_type = other DNA
ccctagaccttcatctttcctga

SEQ ID NO: 1852 - DNA, 27 bp, synthetic construct
  source 1..27: mol_type = other DNA
caaaccagatagtcaaattaagttaat

SEQ ID NO: 1853 - DNA, 27 bp, synthetic construct
  source 1..27: mol_type = other DNA
caaaccagatagtcaaattaagttaat

SEQ ID NO: 1854 - DNA, 23 bp, synthetic construct
  source 1..23: mol_type = other DNA
tttgagagtgcaatgtcaataga

SEQ ID NO: 1855 - DNA, 23 bp, synthetic construct
  source 1..23: mol_type = other DNA
tttgagagtgcaatgtcaataga

SEQ ID NO: 1856 - DNA, 23 bp, synthetic construct
  source 1..23: mol_type = other DNA
aggtaatgtttgaaccctgctga

SEQ ID NO: 1857 - DNA, 23 bp, synthetic construct
  source 1..23: mol_type = other DNA
aggtaatgtttgaaccctgctga

SEQ ID NO: 1858 - DNA, 23 bp, synthetic construct
  source 1..23: mol_type = other DNA
agtgcaatgtcaatagatgctgg

SEQ ID NO: 1859 - DNA, 23 bp, synthetic construct
  source 1..23: mol_type = other DNA
agtgcaatgtcaatagatgctgg

SEQ ID NO: 1860 - DNA, 23 bp, synthetic construct
  source 1..23: mol_type = other DNA
gcagggttcaaacattaccttga

SEQ ID NO: 1861 - DNA, 23 bp, synthetic construct
  source 1..23: mol_type = other DNA
gcagggttcaaacattaccttga

SEQ ID NO: 1862 - DNA, 27 bp, synthetic construct
  source 1..27: mol_type = other DNA
accagatagtcaaattaagttaatgat

SEQ ID NO: 1863 - DNA, 27 bp, synthetic construct
  source 1..27: mol_type = other DNA
accagatagtcaaattaagttaatgat

SEQ ID NO: 1864 - DNA, 27 bp, synthetic construct
  source 1..27: mol_type = other DNA
gaggaaacaagactaatcaggaaagat

SEQ ID NO: 1865 - DNA, 27 bp, synthetic construct
  source 1..27: mol_type = other DNA
gaggaaacaagactaatcaggaaagat

SEQ ID NO: 1866 - DNA, 27 bp, synthetic construct
  source 1..27: mol_type = other DNA
ggtctctgagagaatcattaacttaat

SEQ ID NO: 1867 - DNA, 27 bp, synthetic construct
  source 1..27: mol_type = other DNA
ggtctctgagagaatcattaacttaat

SEQ ID NO: 1868 - DNA, 27 bp, synthetic construct
  source 1..27: mol_type = other DNA
cccacaaaccagatagtcaaattaagt

SEQ ID NO: 1869 - DNA, 27 bp, synthetic construct
  source 1..27: mol_type = other DNA
cccacaaaccagatagtcaaattaagt

SEQ ID NO: 1870 - DNA, 27 bp, synthetic construct
  source 1..27: mol_type = other DNA
atagagtcttataaaatatttgagagt

SEQ ID NO: 1871 - DNA, 27 bp, synthetic construct
  source 1..27: mol_type = other DNA
atagagtcttataaaatatttgagagt

SEQ ID NO: 1872 - DNA, 27 bp, synthetic construct
  source 1..27: mol_type = other DNA
atatttgagagtgcaatgtcaatagat

SEQ ID NO: 1873 - DNA, 27 bp, synthetic construct
  source 1..27: mol_type = other DNA
atatttgagagtgcaatgtcaatagat

SEQ ID NO: 1874 - DNA, 27 bp, synthetic construct
  source 1..27: mol_type = other DNA
caatgtcaatagatgctgggaagtggt

SEQ ID NO: 1875 - DNA, 27 bp, synthetic construct
  source 1..27: mol_type = other DNA
caatgtcaatagatgctgggaagtggt

SEQ ID NO: 1876 - DNA, 27 bp, synthetic construct
  source 1..27: mol_type = other DNA
cacccctagaccttcatctttcctgat

SEQ ID NO: 1877 - DNA, 27 bp, synthetic construct
  source 1..27: mol_type = other DNA
cacccctagaccttcatctttcctgat

SEQ ID NO: 1878 - DNA, 27 bp, synthetic construct
  source 1..27: mol_type = other DNA
cctagaccttcatctttcctgattagt

SEQ ID NO: 1879 - DNA, 27 bp, synthetic construct
  source 1..27: mol_type = other DNA
cctagaccttcatctttcctgattagt

SEQ ID NO: 1880 - DNA, 27 bp, synthetic construct
  source 1..27: mol_type = other DNA
taccttgaatatagagtcttataaaat

SEQ ID NO: 1881 - DNA, 27 bp, synthetic construct
  source 1..27: mol_type = other DNA
taccttgaatatagagtcttataaaat

SEQ ID NO: 1882 - DNA, 27 bp, synthetic construct
  source 1..27: mol_type = other DNA
gaaccctgctgagccagtggcatgggt

SEQ ID NO: 1883 - DNA, 27 bp, synthetic construct
  source 1..27: mol_type = other DNA
gaaccctgctgagccagtggcatgggt

SEQ ID NO: 1884 - DNA, 27 bp, synthetic construct
  source 1..27: mol_type = other DNA
gtgcaatgtcaatagatgctgggaagt

SEQ ID NO: 1885 - DNA, 27 bp, synthetic construct
  source 1..27: mol_type = other DNA
gtgcaatgtcaatagatgctgggaagt

SEQ ID NO: 1886 - DNA, 27 bp, synthetic construct
  source 1..27: mol_type = other DNA
aatcaggaaagatgaaggtctaggggt

SEQ ID NO: 1887 - DNA, 27 bp, synthetic construct
  source 1..27: mol_type = other DNA
aatcaggaaagatgaaggtctaggggt

SEQ ID NO: 1888 - DNA, 27 bp, synthetic construct
  source 1..27: mol_type = other DNA
cttaatttgactatctggtttgtgggt

SEQ ID NO: 1889 - DNA, 27 bp, synthetic construct
  source 1..27: mol_type = other DNA
cttaatttgactatctggtttgtgggt

SEQ ID NO: 1890 - DNA, 27 bp, synthetic construct
  source 1..27: mol_type = other DNA
gttcaaacattaccttgaatatagagt

SEQ ID NO: 1891 - DNA, 27 bp, synthetic construct
  source 1..27: mol_type = other DNA
gttcaaacattaccttgaatatagagt

SEQ ID NO: 1892 - DNA, 27 bp, synthetic construct
  source 1..27: mol_type = other DNA
gccagtggcatgggtctctgagagaat

SEQ ID NO: 1893 - DNA, 27 bp, synthetic construct
  source 1..27: mol_type = other DNA
gccagtggcatgggtctctgagagaat

SEQ ID NO: 1894 - DNA, 27 bp, synthetic construct
  source 1..27: mol_type = other DNA
agacccatgccactggctcagcagggt

SEQ ID NO: 1895 - DNA, 27 bp, synthetic construct
  source 1..27: mol_type = other DNA
agacccatgccactggctcagcagggt

SEQ ID NO: 1896 - DNA, 27 bp, synthetic construct
  source 1..27: mol_type = other DNA
cagcagggttcaaacattaccttgaat

SEQ ID NO: 1897 - DNA, 27 bp, synthetic construct
  source 1..27: mol_type = other DNA
cagcagggttcaaacattaccttgaat

SEQ ID NO: 1898 - DNA, 27 bp, synthetic construct
  source 1..27: mol_type = other DNA
gcatctattgacattgcactctcaaat

SEQ ID NO: 1899 - DNA, 27 bp, synthetic construct
  source 1..27: mol_type = other DNA
gcatctattgacattgcactctcaaat

SEQ ID NO: 1900 - RNA, 21 nt, synthetic construct
  source 1..21: mol_type = other RNA
tattttataagactctatatt

SEQ ID NO: 1901 - RNA, 21 nt, synthetic construct
  source 1..21: mol_type = other RNA
tattttataagactctatatt

SEQ ID NO: 1902 - RNA, 20 nt, synthetic construct
  source 1..20: mol_type = other RNA
aggcaatgtggagcagctga

SEQ ID NO: 1903 - RNA, 20 nt, synthetic construct
  source 1..20: mol_type = other RNA
aggcaatgtggagcagctga

SEQ ID NO: 1904 - RNA, 20 nt, synthetic construct
  source 1..20: mol_type = other RNA
atgattctctcagagaccca

SEQ ID NO: 1905 - RNA, 20 nt, synthetic construct
  source 1..20: mol_type = other RNA
atgattctctcagagaccca

SEQ ID NO: 1906 - RNA, 20 nt, synthetic construct
  source 1..20: mol_type = other RNA
gcaatgtggagcagctgagg

SEQ ID NO: 1907 - RNA, 20 nt, synthetic construct
  source 1..20: mol_type = other RNA
gcaatgtggagcagctgagg

SEQ ID NO: 1908 - RNA, 20 nt, synthetic construct
  source 1..20: mol_type = other RNA
ggaggaaacaagactaatca

SEQ ID NO: 1909 - RNA, 20 nt, synthetic construct
  source 1..20: mol_type = other RNA
ggaggaaacaagactaatca

SEQ ID NO: 1910 - RNA, 20 nt, synthetic construct
  source 1..20: mol_type = other RNA
atcaggaaagatgaaggtct

SEQ ID NO: 1911 - RNA, 20 nt, synthetic construct
  source 1..20: mol_type = other RNA
atcaggaaagatgaaggtct

SEQ ID NO: 1912 - RNA, 20 nt, synthetic construct
  source 1..20: mol_type = other RNA
aatttgactatctggtttgt

SEQ ID NO: 1913 - RNA, 20 nt, synthetic construct
  source 1..20: mol_type = other RNA
aatttgactatctggtttgt

SEQ ID NO: 1914 - RNA, 20 nt, synthetic construct
  source 1..20: mol_type = other RNA
tcaggaaagatgaaggtcta

SEQ ID NO: 1915 - RNA, 20 nt, synthetic construct
  source 1..20: mol_type = other RNA
tcaggaaagatgaaggtcta

SEQ ID NO: 1916 - RNA, 20 nt, synthetic construct
  source 1..20: mol_type = other RNA
aagccatttcccccctcagc

SEQ ID NO: 1917 - RNA, 20 nt, synthetic construct
  source 1..20: mol_type = other RNA
aagccatttcccccctcagc

SEQ ID NO: 1918 - RNA, 21 nt, synthetic construct
  source 1..21: mol_type = other RNA
gaaggagtaaggagacataaa

SEQ ID NO: 1919 - RNA, 21 nt, synthetic construct
  source 1..21: mol_type = other RNA
gaaggagtaaggagacataaa

SEQ ID NO: 1920 - RNA, 20 nt, synthetic construct
  source 1..20: mol_type = other RNA
caggaaagatgaaggtctag

SEQ ID NO: 1921 - RNA, 20 nt, synthetic construct
  source 1..20: mol_type = other RNA
caggaaagatgaaggtctag

SEQ ID NO: 1922 - RNA, 20 nt, synthetic construct
  source 1..20: mol_type = other RNA
taatttgactatctggtttg

SEQ ID NO: 1923 - RNA, 20 nt, synthetic construct
  source 1..20: mol_type = other RNA
taatttgactatctggtttg

SEQ ID NO: 1924 - RNA, 21 nt, synthetic construct
  source 1..21: mol_type = other RNA
ttttattttatccaaaagaaa

SEQ ID NO: 1925 - RNA, 21 nt, synthetic construct
  source 1..21: mol_type = other RNA
ttttattttatccaaaagaaa

SEQ ID NO: 1926 - RNA, 20 nt, synthetic construct
  source 1..20: mol_type = other RNA
ttgactatctggtttgtggg

SEQ ID NO: 1927 - RNA, 20 nt, synthetic construct
  source 1..20: mol_type = other RNA
ttgactatctggtttgtggg

SEQ ID NO: 1928 - RNA, 20 nt, synthetic construct
  source 1..20: mol_type = other RNA
taagttaatgattctctcag

SEQ ID NO: 1929 - RNA, 20 nt, synthetic construct
  source 1..20: mol_type = other RNA
taagttaatgattctctcag

SEQ ID NO: 1930 - RNA, 20 nt, synthetic construct
  source 1..20: mol_type = other RNA
gagagtgcaatgtcaataga

SEQ ID NO: 1931 - RNA, 20 nt, synthetic construct
  source 1..20: mol_type = other RNA
gagagtgcaatgtcaataga

SEQ ID NO: 1932 - RNA, 20 nt, synthetic construct
  source 1..20: mol_type = other RNA
tgtcaatagatgctgggaag

SEQ ID NO: 1933 - RNA, 20 nt, synthetic construct
  source 1..20: mol_type = other RNA
tgtcaatagatgctgggaag

SEQ ID NO: 1934 - RNA, 20 nt, synthetic construct
  source 1..20: mol_type = other RNA
accctgctgagccagtggca

SEQ ID NO: 1935 - RNA, 20 nt, synthetic construct
  source 1..20: mol_type = other RNA
accctgctgagccagtggca

SEQ ID NO: 1936 - RNA, 20 nt, synthetic construct
  source 1..20: mol_type = other RNA
tcaaggtaatgtttgaaccc

SEQ ID NO: 1937 - RNA, 20 nt, synthetic construct
  source 1..20: mol_type = other RNA
tcaaggtaatgtttgaaccc

SEQ ID NO: 1938 - RNA, 20 nt, synthetic construct
  source 1..20: mol_type = other RNA
gaaagatgaaggtctagggg

SEQ ID NO: 1939 - RNA, 20 nt, synthetic construct
  source 1..20: mol_type = other RNA
gaaagatgaaggtctagggg

SEQ ID NO: 1940 - RNA, 20 nt, synthetic construct
  source 1..20: mol_type = other RNA
aagatgaaggtctaggggtg

SEQ ID NO: 1941 - RNA, 20 nt, synthetic construct
  source 1..20: mol_type = other RNA
aagatgaaggtctaggggtg

SEQ ID NO: 1942 - RNA, 21 nt, synthetic construct
  source 1..21: mol_type = other RNA
taaaatatttgagagtgcaat

SEQ ID NO: 1943 - RNA, 21 nt, synthetic construct
  source 1..21: mol_type = other RNA
taaaatatttgagagtgcaat

SEQ ID NO: 1944 - RNA, 20 nt, synthetic construct
  source 1..20: mol_type = other RNA
gggaggaaacaagactaatc

SEQ ID NO: 1945 - RNA, 20 nt, synthetic construct
  source 1..20: mol_type = other RNA
gggaggaaacaagactaatc

SEQ ID NO: 1946 - RNA, 20 nt, synthetic construct
  source 1..20: mol_type = other RNA
cccatgccactggctcagca

SEQ ID NO: 1947 - RNA, 20 nt, synthetic construct
  source 1..20: mol_type = other RNA
cccatgccactggctcagca

SEQ ID NO: 1948 - RNA, 20 nt, synthetic construct
  source 1..20: mol_type = other RNA
tgcaatgtcaatagatgctg

SEQ ID NO: 1949 - RNA, 20 nt, synthetic construct
  source 1..20: mol_type = other RNA
tgcaatgtcaatagatgctg

SEQ ID NO: 1950 - RNA, 20 nt, synthetic construct
  source 1..20: mol_type = other RNA
taaaggcaatgtggagcagc

SEQ ID NO: 1951 - RNA, 20 nt, synthetic construct
  source 1..20: mol_type = other RNA
taaaggcaatgtggagcagc

SEQ ID NO: 1952 - RNA, 21 nt, synthetic construct
  source 1..21: mol_type = other RNA
gtcttataaaatatttgagag

SEQ ID NO: 1953 - RNA, 21 nt, synthetic construct
  source 1..21: mol_type = other RNA
gtcttataaaatatttgagag

SEQ ID NO: 1954 - RNA, 20 nt, synthetic construct
  source 1..20: mol_type = other RNA
tttgaaccctgctgagccag

SEQ ID NO: 1955 - RNA, 20 nt, synthetic construct
  source 1..20: mol_type = other RNA
tttgaaccctgctgagccag

SEQ ID NO: 1956 - RNA, 20 nt, synthetic construct
  source 1..20: mol_type = other RNA
gtaatgtttgaaccctgctg

SEQ ID NO: 1957 - RNA, 20 nt, synthetic construct
  source 1..20: mol_type = other RNA
gtaatgtttgaaccctgctg

SEQ ID NO: 1958 - RNA, 20 nt, synthetic construct
  source 1..20: mol_type = other RNA
ttgaaccctgctgagccagt

SEQ ID NO: 1959 - RNA, 20 nt, synthetic construct
  source 1..20: mol_type = other RNA
ttgaaccctgctgagccagt

SEQ ID NO: 1960 - RNA, 20 nt, synthetic construct
  source 1..20: mol_type = other RNA
gccagtggcatgggtctctg

SEQ ID NO: 1961 - RNA, 20 nt, synthetic construct
  source 1..20: mol_type = other RNA
gccagtggcatgggtctctg

SEQ ID NO: 1962 - RNA, 21 nt, synthetic construct
  source 1..21: mol_type = other RNA
tttataagactctatattcaa

SEQ ID NO: 1963 - RNA, 21 nt, synthetic construct
  source 1..21: mol_type = other RNA
tttataagactctatattcaa

SEQ ID NO: 1964 - RNA, 20 nt, synthetic construct
  source 1..20: mol_type = other RNA
gagccagtggcatgggtctc

SEQ ID NO: 1965 - RNA, 20 nt, synthetic construct
  source 1..20: mol_type = other RNA
gagccagtggcatgggtctc

SEQ ID NO: 1966 - RNA, 21 nt, synthetic construct
  source 1..21: mol_type = other RNA
atcattaacttaatttgacta

SEQ ID NO: 1967 - RNA, 21 nt, synthetic construct
  source 1..21: mol_type = other RNA
atcattaacttaatttgacta

SEQ ID NO: 1968 - RNA, 20 nt, synthetic construct
  source 1..20: mol_type = other RNA
ccctagaccttcatctttcc

SEQ ID NO: 1969 - RNA, 20 nt, synthetic construct
  source 1..20: mol_type = other RNA
ccctagaccttcatctttcc

SEQ ID NO: 1970 - RNA, 21 nt, synthetic construct
  source 1..21: mol_type = other RNA
caaaccagatagtcaaattaa

SEQ ID NO: 1971 - RNA, 21 nt, synthetic construct
  source 1..21: mol_type = other RNA
caaaccagatagtcaaattaa

SEQ ID NO: 1972 - RNA, 20 nt, synthetic construct
  source 1..20: mol_type = other RNA
tttgagagtgcaatgtcaat

SEQ ID NO: 1973 - RNA, 20 nt, synthetic construct
  source 1..20: mol_type = other RNA
tttgagagtgcaatgtcaat

SEQ ID NO: 1974 - RNA, 20 nt, synthetic construct
  source 1..20: mol_type = other RNA
aggtaatgtttgaaccctgc

SEQ ID NO: 1975 - RNA, 20 nt, synthetic construct
  source 1..20: mol_type = other RNA
aggtaatgtttgaaccctgc

SEQ ID NO: 1976 - RNA, 20 nt, synthetic construct
  source 1..20: mol_type = other RNA
agtgcaatgtcaatagatgc

SEQ ID NO: 1977 - RNA, 20 nt, synthetic construct
  source 1..20: mol_type = other RNA
agtgcaatgtcaatagatgc

SEQ ID NO: 1978 - RNA, 20 nt, synthetic construct
  source 1..20: mol_type = other RNA
gcagggttcaaacattacct

SEQ ID NO: 1979 - RNA, 20 nt, synthetic construct
  source 1..20: mol_type = other RNA
gcagggttcaaacattacct

SEQ ID NO: 1980 - RNA, 21 nt, synthetic construct
  source 1..21: mol_type = other RNA
accagatagtcaaattaagtt

SEQ ID NO: 1981 - RNA, 21 nt, synthetic construct
  source 1..21: mol_type = other RNA
accagatagtcaaattaagtt

SEQ ID NO: 1982 - RNA, 21 nt, synthetic construct
  source 1..21: mol_type = other RNA
gaggaaacaagactaatcagg

SEQ ID NO: 1983 - RNA, 21 nt, synthetic construct
  source 1..21: mol_type = other RNA
gaggaaacaagactaatcagg

SEQ ID NO: 1984 - RNA, 21 nt, synthetic construct
  source 1..21: mol_type = other RNA
ggtctctgagagaatcattaa

SEQ ID NO: 1985 - RNA, 21 nt, synthetic construct
  source 1..21: mol_type = other RNA
ggtctctgagagaatcattaa

SEQ ID NO: 1986 - RNA, 21 nt, synthetic construct
  source 1..21: mol_type = other RNA
cccacaaaccagatagtcaaa

SEQ ID NO: 1987 - RNA, 21 nt, synthetic construct
  source 1..21: mol_type = other RNA
cccacaaaccagatagtcaaa

SEQ ID NO: 1988 - RNA, 21 nt, synthetic construct
  source 1..21: mol_type = other RNA
atagagtcttataaaatattt

SEQ ID NO: 1989 - RNA, 21 nt, synthetic construct
  source 1..21: mol_type = other RNA
atagagtcttataaaatattt

SEQ ID NO: 1990 - RNA, 21 nt, synthetic construct
  source 1..21: mol_type = other RNA
atatttgagagtgcaatgtca

SEQ ID NO: 1991 - RNA, 21 nt, synthetic construct
  source 1..21: mol_type = other RNA
atatttgagagtgcaatgtca

SEQ ID NO: 1992 - RNA, 21 nt, synthetic construct
  source 1..21: mol_type = other RNA
caatgtcaatagatgctggga

SEQ ID NO: 1993 - RNA, 21 nt, synthetic construct
  source 1..21: mol_type = other RNA
caatgtcaatagatgctggga

SEQ ID NO: 1994 - RNA, 21 nt, synthetic construct
  source 1..21: mol_type = other RNA
cacccctagaccttcatcttt

SEQ ID NO: 1995 - RNA, 21 nt, synthetic construct
  source 1..21: mol_type = other RNA
cacccctagaccttcatcttt

SEQ ID NO: 1996 - RNA, 21 nt, synthetic construct
  source 1..21: mol_type = other RNA
cctagaccttcatctttcctg

SEQ ID NO: 1997 - RNA, 21 nt, synthetic construct
  source 1..21: mol_type = other RNA
cctagaccttcatctttcctg

SEQ ID NO: 1998 - RNA, 21 nt, synthetic construct
  source 1..21: mol_type = other RNA
taccttgaatatagagtctta

SEQ ID NO: 1999 - RNA, 21 nt, synthetic construct
  source 1..21: mol_type = other RNA
taccttgaatatagagtctta

SEQ ID NO: 2000 - RNA, 21 nt, synthetic construct
  source 1..21: mol_type = other RNA
gaaccctgctgagccagtggc

SEQ ID NO: 2001 - RNA, 21 nt, synthetic construct
  source 1..21: mol_type = other RNA
gaaccctgctgagccagtggc

SEQ ID NO: 2002 - RNA, 21 nt, synthetic construct
  source 1..21: mol_type = other RNA
gtgcaatgtcaatagatgctg

SEQ ID NO: 2003 - RNA, 21 nt, synthetic construct
  source 1..21: mol_type = other RNA
gtgcaatgtcaatagatgctg

SEQ ID NO: 2004 - RNA, 21 nt, synthetic construct
  source 1..21: mol_type = other RNA
aatcaggaaagatgaaggtct

SEQ ID NO: 2005 - RNA, 21 nt, synthetic construct
  source 1..21: mol_type = other RNA
aatcaggaaagatgaaggtct

SEQ ID NO: 2006 - RNA, 21 nt, synthetic construct
  source 1..21: mol_type = other RNA
cttaatttgactatctggttt

SEQ ID NO: 2007 - RNA, 21 nt, synthetic construct
  source 1..21: mol_type = other RNA
cttaatttgactatctggttt

SEQ ID NO: 2008 - RNA, 21 nt, synthetic construct
  source 1..21: mol_type = other RNA
gttcaaacattaccttgaata

SEQ ID NO: 2009 - RNA, 21 nt, synthetic construct
  source 1..21: mol_type = other RNA
gttcaaacattaccttgaata

SEQ ID NO: 2010 - RNA, 21 nt, synthetic construct
  source 1..21: mol_type = other RNA
gccagtggcatgggtctctga

SEQ ID NO: 2011 - RNA, 21 nt, synthetic construct
  source 1..21: mol_type = other RNA
gccagtggcatgggtctctga

SEQ ID NO: 2012 - RNA, 21 nt, synthetic construct
  source 1..21: mol_type = other RNA
agacccatgccactggctcag

SEQ ID NO: 2013 - RNA, 21 nt, synthetic construct
  source 1..21: mol_type = other RNA
agacccatgccactggctcag

SEQ ID NO: 2014 - RNA, 21 nt, synthetic construct
  source 1..21: mol_type = other RNA
cagcagggttcaaacattacc

SEQ ID NO: 2015 - RNA, 21 nt, synthetic construct
  source 1..21: mol_type = other RNA
cagcagggttcaaacattacc

SEQ ID NO: 2016 - RNA, 21 nt, synthetic construct
  source 1..21: mol_type = other RNA
gcatctattgacattgcactc

SEQ ID NO: 2017 - RNA, 21 nt, synthetic construct
  source 1..21: mol_type = other RNA
gcatctattgacattgcactc

What is claimed:

1. A method of editing a nucleobase of a lipoprotein A (LPA) polynucleotide in a cell, the method comprising contacting the LPA polynucleotide with a base editor system comprising a guide RNA, or a polynucleotide encoding said guide RNA, and a base editor comprising a fusion protein or a protein complex comprising a nucleic acid programmable DNA binding protein (napDNAbp) domain and a deaminase domain, or one or more polynucleotides encoding the base editor, wherein said guide RNA targets said base editor to effect an alteration of the nucleobase of the LPA polynucleotide.

2. A method of treating atherosclerosis and/or cardiovascular disease in a subject in need thereof, the method comprising contacting a cell of the subject with a base editor system comprising a base editor comprising a fusion protein or protein complex comprising a nucleic acid programmable DNA binding protein (napDNAbp) domain and a deaminase domain, or one or more polynucleotide encoding the base editor, and a guide RNA, or a polynucleotide encoding said guide RNA, wherein the guide RNA targets the base editor to effect an alteration of a nucleobase of an LPA polynucleotide.

3. The method of claim 1, wherein the guide RNA is selected from the guides listed in Tables 1B-1, 1A-1, and 1C-1.

4. The method of claim 1, wherein the deaminase domain is an adenosine deaminase comprising an amino acid sequence with at least about 90% identity to the following amino acid sequence or a fragment thereof lacking the N-terminal methionine and comprises one or more amino acid alterations selected from the group consisting of I76Y, V82S, Y123H, Y147R, and Q154R compared to the following amino acid sequence:
TadA*7.10
(SEQ ID NO: 1)
MSEVEFSHEYWMRHALTLAKRARDEREVPVGAVLVLNNRVIGEGWNRAIG
LHDPTAHAEIMALRQGGLVMQNYRLIDATLYVTFEPCVMCAGAMIHSRIG
RVVFGVRNAKTGAAGSLMDVLHYPGMNHRVEITEGILADECAALLCYFFR
MPRQVFNAQKKAQSSTD.

5. The method of claim 4, wherein the adenosine deaminase comprises the amino acid alterations I76Y, V82S, Y123H, Y147R, and Q154R.

6. The method of claim 1, wherein the deaminase domain is a cytidine deaminase comprising an amino acid sequence with at least about 90% identity to the following amino acid sequence or a fragment thereof lacking the N-terminal methionine:
ppAPOBEC1
(SEQ ID NO: 23)
MTSEKGPSTGDPTLRRRIESWEFDVFYDPRELRKETCLLYEIKWGMSRKI
WRSSGKNTTNHVEVNFIKKFTSERRFHSSISCSITWFLSWSPCWECSQAI
REFLSQHPGVTLVIYVARLFWHMDQRNRQGLRDLVNSGVTIQIMRASEYY
HCWRNFVNYPPGDEAHWPQYPPLWMMLYALELHCIILSLPPCLKISRRWQ
NHLAFFRLHLQNCHYQTIPPHILLATGLIHPSVTWR.

7. The method of claim 1, wherein alteration of the nucleobase is associated with a reduction in transcription of a polynucleotide sequence encoding the LPA protein; and/or wherein alteration of the nucleobase in the LPA polynucleotide disrupts a splice site.

8. The method of claim 1, wherein the alteration introduces a single nucleotide polymorphism (SNP) into the LPA polynucleotide, wherein the SNP is associated with reduced serum concentrations of LPA in a subject and/or reduced incidence of atherosclerosis and/or cardiovascular disease in a subject, and wherein the SNP is selected from the group consisting of, chr6:160531784:T>C, chr6:160532531:C>T, chr6:160548552:G>A, chr6:160532610:A>G, chr6:160591049:A>G, chr6:160635134:G>A, and chr6:160547886:A>G.

9. The method of claim 2, wherein the method is associated with at least a 10% reduction of incidence of coronary heart disease in the subject.

10. The method of claim 2, wherein the base editor system is administered to the subject using a lipid nanoparticle comprising the guide RNA and an mRNA molecule encoding the base editor.

11. A modified cell comprising an alteration in a nucleobase of a LPA polynucleotide, wherein the alteration is prepared by the method of claim 1.

12. A base editor system comprising a fusion protein or one or more polynucleotides encoding said fusion protein, wherein said fusion protein comprises a nucleic acid programmable DNA binding protein domain (napDNAbp) and a deaminase domain, and a guide RNA, or a guide polynucleotide encoding said guide RNA, wherein said guide RNA targets said base editor to effect an alteration of a nucleobase of an LPA polynucleotide.

13. The base editor system of claim 12, wherein the guide RNA is selected from the guides 5 listed in Tables 1B-1, 1A-1, and 1C-1.

14. The base editor system of claim 12, wherein the deaminase is an adenosine deaminase comprising an amino acid sequence with at least about 90% identity to the following amino acid sequence or a fragment thereof lacking the N-terminal methionine and comprises one or more amino acid alterations selected from the group consisting of I76Y, V82S, Y123H, Y147R, and Q154R compared to the following amino acid sequence:
TadA*7.10
(SEQ ID NO: 1)
MSEVEFSHEYWMRHALTLAKRARDEREVPVGAVLVLNNRVIGEGWNRAIG
LHDPTAHAEIMALRQGGLVMQNYRLIDATLYVTFEPCVMCAGAMIHSRIG
RVVFGVRNAKTGAAGSLMDVLHYPGMNHRVEITEGILADECAALLCYFFR
MPRQVFNAQKKAQSSTD.

15. The base editor system of claim 12, wherein the SNP is selected from the group consisting of, chr6:160531784:T>C, chr6:160532531:C>T, chr6:160548552:G>A, chr6:160532610:A>G, chr6:160591049:A>G, chr6:160635134:G>A, and chr6:160547886:A>G.

16. A polynucleotide or set of polynucleotides encoding the base editor system of claim 12 or a component thereof.

17. A lipid nanoparticle comprising the base editor system of claim 12.

18. A pharmaceutical composition comprising the modified cell of claim 11, and a pharmaceutically acceptable excipient.

19. A kit comprising the modified cell of claim 11, and directions for the use of same.

20. A guide RNA comprising a sequence listed in Table 1B-1, 1B-2, 1A-1, 1A-2, 1C-1, or 1C-2.
